(19) United States
(12) Patent Application Publication
(10) Pub. No.: US 2019/0382849 A1
(43) Pub. Date: Dec. 19, 2019

(54) METHODS, ARRAYS AND USES THEREOF

(71) Applicant: IMMUNOVIA AB, Lund (SE)

(72) Inventors: Carl Borrebaeck, Lund (SE); Linda Dexlin Mellby, Dalby (SE); Andreas Nyberg, Malmo (SE); Christer Wingren, Sodra Sandby (SE)

(21) Appl. No.: 16/479,064

(22) PCT Filed: Jan. 31, 2018
(86) PCT No.: PCT/EP2018/052423

§ 371 Date: Jul. 18, 2019

(30) Foreign Application Priority Data
Jan. 31, 2017 (GB) 1701572.8

(51) Int. Cl. C12Q 1/6886; G16H 50/30; C12Q 1/6813

(52) U.S. Cl. CPC C12Q 1/6886; C12Q 2600/158; C12Q 1/6813; G16H 50/30

(57) ABSTRACT

The present invention provides a method for diagnosing or determining a pancreatic cancer-associated disease state comprising or consisting of the steps of: (a) providing a sample from an individual to be tested; and (b) determining a biomarker signature of the test sample by measuring the presence and/or amount in the test sample of one or more biomarker selected from the group defined in Table A; wherein the presence and/or amount in the test sample of the one or more biomarker selected from the group defined in Table A is indicative of the pancreatic cancer associated disease in the individual; uses and methods of determining a pancreatic cancer-associated disease state, and methods of treating pancreatic cancer, together with arrays and kits for use in the same.

### FIELD OF INVENTION

[0001] The present invention provides in vitro methods for determining a pancreatic cancer-associated disease state (such as pancreatic cancer presence, pancreatic cancer risk, pancreatic cancer stage and/or presence of related lesions such as intraductal papillary mucinous neoplasms), as well as arrays and kits for use in such methods.

### BACKGROUND

[0002] The incidence of pancreatic ductal adenocarcinoma (PDAC) is increasing and has been the cause of death in 330,400 patients worldwide¹. PDAC is one of the most lethal cancers with a five-year survival of less than 10%²⁻⁴. In 2030 PDAC is thought to become the second leading cause of death of cancer⁵. One factor behind this dismal development is diffuse symptoms resulting in late diagnosis, when only approximately 15% of patients present with a resectable tumor^{2-4, 6, 7}. Consequently, since surgical resection is the only potentially curative treatment for PDAC, earlier detection is required. In line with this, if localized tumors could be resected the five-year survival has been shown to increase from 43% (stage II) to over 50% (stage 1)⁸. Pancreatic tumors have furthermore been reported to be resectable at an asymptomatic stage, six months prior to clinical diagnosis^{9,10.} A recent surveillance study of asymptomatic high-risk patients carrying the CDKN2A mutation resulted in a 75% resection rate and a 24% five-year survival, which is much improved compared to sporadic PDAC patients¹¹. Taken together, it is reasonable to believe that earlier diagnosis would result in increased survival for patients with PDAC^{12, 13} and that asymptomatic high-risk patients would benefit from effective surveillance¹⁴.

[0003] The most evaluated biomarker for PDAC thus far, serum CA19-9, suffers from inadequate specificity, with elevated levels in several other indications, as well as a complete absence in patients that are genotypically Lewis a⁻b⁻ (5% of the population). Consequently, the use of CA19-9 by itself is not recommended for screening¹⁵, or as evidence of recurrence¹⁶, but is recommended for disease monitoring after e.g. surgical resection¹⁷. Therefore, the field of cancer diagnostics is increasingly focusing on multiparametric analysis^{18,19} of markers in both diagnostic^{20, 21} and pre-diagnostic samples^{22, 23}, since this approach yields improved sensitivity and specificity, also in combination with CA19-9^{24, 25}. In fact, it has been demonstrated that combinations of immunoregulatory and cancer-associated protein biomarkers can discriminate between late stage III/IV PDAC patients and healthy controls^{26, 27}.

[0004] However, there remains a need for improved methods of diagnosing pancreatic cancers such as PDAC, particularly in the early stages of the disease.

### SUMMARY OF THE INVENTION

[0005] Accordingly, a first aspect of the invention provides a method for diagnosing or determining a pancreatic cancer-associated disease state comprising or consisting of the steps of:
[0006] (a) providing a sample from an individual to be tested; and
[0007] (b) determining a biomarker signature of the test sample by measuring the presence and/or amount in the test sample of one or more biomarker(s) selected from the group defined in Table A;

[0008] wherein the presence and/or amount in the test sample of the one or more biomarkers selected from the group defined in Table A is indicative of the pancreatic cancer-associated disease state in the individual.

TABLE A
Part (i)
Disks large homolog 1 (DLG1; e.g. UniProt ID Q12959)
Protein kinase C zeta type (PRKCZ; e.g. UniProt ID Q05513)
Part (ii)
Vascular endothelial growth factor (VEGF; e.g. UniProt ID P15692)
Complement C3 (C3; e.g. UniProt ID P01024)
Plasma protease C1 inhibitor (C1INH; e.g. UniProt ID P05155)
Interleukin-4 (IL-4; e.g. UniProt ID P05112)
Interferon gamma (IFNγ; e.g. UniProt ID P01579)
Complement C5 (C5; e.g. UniProt ID P01031)
Protein-tyrosine kinase 6 (PTK6; e.g. UniProt ID Q13882)
Part (iii)
Calcineurin B homologous protein 1 (CHP1; e.g. UniProt ID Q99653)
GTP-binding protein GEM (GEM; e.g. UniProt ID P55040)
Aprataxin and PNK-like factor (APLF; e.g. UniProt ID Q8IW19)
Calcium/calmodulin-dependent protein kinase type IV (CAMK4; e.g.
UniProt ID Q16566)
Membrane-associated guanylate kinase, WW and PDZ domain-containing
protein 1 (MAGI; e.g. UniProt ID Q96QZ7)
Serine/threonine-protein kinase MARK1 (MARK1; e.g. UniProt ID
Q9P0L2)
PR domain zinc finger protein 8 (PRDM8; e.g. UniProt ID Q9NQV8)
Part (iv)
Apolipoprotein A1 (APOA1; e.g. UniProt ID P02647)
Cyclin-dependent kinase 2 (CDK2; e.g. UniProt ID P24941)
HADH2 protein (HADH2; e.g. UniProt ID Q6IBS9)
Interleukin-6 (IL-6; e.g. UniProt ID P05231)
Complement C4 (C4; e.g. UniProt ID P0COL4/5)
Visual system homeobox 2 (VSX2/CHX10; e.g. UniProt ID P58304)
Intercellular adhesion molecule 1 (ICAM-1; e.g. UniProt ID P05362)
Interleukin-13 (IL-13; e.g. UniProt ID P35225)
Lewis x (Lewis x/CD15)
Myomesin-2 (MYOM2; e.g. UniProt ID P54296)
Properdin (Factor P; e.g. UniProt ID P27918)
Sialyl Lewis x (Sialyl Lewis x)
Lymphotoxin-alpha (TNFβ; e.g. UniProt ID P01374)

[0009] Thus, in one embodiment, the method comprises determining a biomarker signature of the test sample, which enables a diagnosis to be reached in respect of the individual from which the sample is obtained.

[0010] The methods of the invention are suitable for testing a sample from any individual who is suspected of having, or at risk of developing, a pancreatic cancer-associated disease state.

[0011] For example, the individual may be from one of the following groups with an elevated risk of having or developing pancreatic cancer:
[0012] (i) Individuals with a family history of pancreatic cancer (e.g. within one or two generations on either the maternal or paternal side);
[0013] (ii) Individuals diagnosed with new-onset diabetes (e.g. type II), especially those aged 50 years or over; and
[0014] (iii) Individuals with symptoms suggestive or consistent with pancreatic cancer, e.g. pain in the upper abdomen or upper back, loss of appetite, weight loss, jaundice (yellow skin and eyes, and dark urine), indigestion, nausea, vomiting and/or extreme tiredness (fatigue)).

[0015] By “pancreatic cancer-associated disease state” we include pancreatic cancer presence per se, the risk of having or of developing pancreatic cancer, pancreatic cancer stage and presence of related lesions such as intraductal papillary mucinous neoplasms (see below). In particular, we include the presence and/or stage of pancreatic ductal adenocarcinoma (PDAC).

[0016] Thus, in one embodiment, the methods of the invention provide a qualitative result for the detection of pancreatic abnormalities in individuals with increased risk of developing PDAC. In specific embodiment, the methods of the invention permit:
[0017] (a) the diagnosis and/or staging of early pancreatic cancer; and
[0018] (b) the diagnosis and/or staging of late pancreatic cancer.

[0019] Advantageously, the methods of the invention also enable the differentiation between pancreatic cancer and chronic pancreatitis in an individual.

[0020] In a further embodiment, the methods of the invention may be used to detect the presence in an individual of intraductal papillary mucinous neoplasms (IPMN). Such lesions, if left untreated, can progress to invasive cancer. Consequently, it is important to detect these lesions, since this may present an opportunity to remove a premalignant lesion. In one embodiment, the IPMN lesions are malignant.

[0021] By “biomarker” we include any naturally-occurring biological molecule, or component or fragment thereof, the measurement of which can provide information useful in the diagnosis of pancreatic cancer. Thus, in the context of Table A, the biomarker may be the protein, or a polypeptide fragment or carbohydrate moiety thereof (or, in the case of sialyl Lewis x, a carbohydrate moiety per se). Alternatively, the biomarker may be a nucleic acid molecule, such as a mRNA, cDNA or circulating tumour DNA molecule, which encodes the protein or part thereof.

[0022] By “diagnosis” we include determining the presence or absence of a disease state in an individual (e.g., determining whether an individual is or is not suffering from early stage pancreatic cancer or late stage pancreatic cancer).

[0023] By “staging” we include determining the stage of a pancreatic cancer, for example, determining whether the pancreatic cancer is stage I, stage II, stage III or stage IV (e.g., stage I, stage II, stage I-II, stage III-IV or stage I-IV).

[0024] By “early pancreatic cancer” (or “early stage pancreatic cancer”) we include or mean pancreatic cancer comprising or consisting of stage I and/or stage II pancreatic cancer, for example as determined by the American Joint Committee on Cancer (AJCC) TNM system (e.g., see: http://www.cancer.orq/cancer/pancreaticcancer/detailedquide/pancreatic-cancer-staging and AJCC Cancer Staging Manual (7^{th} ed.), 2011, Edge et al., Springer which are incorporated by reference herein).

[0025] The TNM cancer staging system is based on 3 key pieces of information:
[0026] T describes the size of the main (primary) tumour and whether it has grown outside the pancreas and into nearby organs.
[0027] N describes the spread to nearby (regional) lymph nodes.
[0028] M indicates whether the cancer has metastasized (spread) to other organs of the body. (The most common sites of pancreatic cancer spread are the liver, lungs, and the peritoneum—the space around the digestive organs.)

[0029] Numbers or letters appear after T, N, and M to provide more details about each of these factors.

[0030] T Categories
[0031] TX: The main tumour cannot be assessed.
[0032] T0: No evidence of a primary tumour.
[0033] Tis: Carcinoma in situ (the tumour is confined to the top layers of pancreatic duct cells). (Very few pancreatic tumours are found at this stage.)
[0034] T1: The cancer is still within the pancreas and is 2 centimetres (cm) (about % inch) or less across.
[0035] T2: The cancer is still within the pancreas but is larger than 2 cm across.
[0036] T3: The cancer has grown outside the pancreas into nearby surrounding tissues but not into major blood vessels or nerves.
[0037] T4: The cancer has grown beyond the pancreas into nearby large blood vessels or nerves.

[0038] N Categories
[0039] NX: Nearby (regional) lymph nodes cannot be assessed.
[0040] N0: The cancer has not spread to nearby lymph nodes.
[0041] N1: The cancer has spread to nearby lymph nodes.

[0042] M Categories
[0043] M0: The cancer has not spread to distant lymph nodes (other than those near the pancreas) or to distant organs such as the liver, lungs, brain, etc.
[0044] M1: The cancer has spread to distant lymph nodes or to distant organs.

[0045] Once the T, N, and M categories have been determined, this information is combined to assign an overall stage of 0, I, II, III, or IV (sometimes followed by a letter). This process is called stage grouping.

[0046] Stage 0 (Tis, N0, M0):

[0047] The tumour is confined to the top layers of pancreatic duct cells and has not invaded deeper tissues. It has not spread outside of the pancreas. These tumours are sometimes referred to as pancreatic carcinoma in situ.

[0048] Stage IA (T1, N0, M0): The tumour is confined to the pancreas and is 2 cm across or smaller (T1). It has not spread to nearby lymph nodes (NO) or distant sites (M0).

[0049] Stage IB (T2, N0, M0): The tumour is confined to the pancreas and is larger than 2 cm across (T2). It has not spread to nearby lymph nodes (NO) or distant sites (M0).

[0050] Stage IIA (T3, N0, M0): The tumour is growing outside the pancreas but not into major blood vessels or nerves (T3). It has not spread to nearby lymph nodes (NO) or distant sites (M0).

[0051] Stage IIB (T1-3, N1, M0): The tumour is either confined to the pancreas or growing outside the pancreas but not into major blood vessels or nerves (T1-T3). It has spread to nearby lymph nodes (N1) but not to distant sites (M0).

[0052] Stage III (T4, Any N, M0): The tumour is growing outside the pancreas into nearby major blood vessels or nerves (T4). It may or may not have spread to nearby lymph nodes (Any N). It has not spread to distant sites (M0).

[0053] Stage IV (Any T, Any N, M1): The cancer has spread to distant sites (M1).

[0054] Alternatively or additionally, by “early pancreatic cancer” (or “early stage pancreatic cancer”) we include or mean asymptomatic pancreatic cancer. Common presenting symptoms of pancreatic cancers include jaundice (for tumours of the pancreas head), abdominal pain, weight loss, steatorrhoea, and new-onset diabetes. For example, the pancreatic cancer may be present at least 1 week before symptoms (e.g., common symptoms) are observed or observable, for example, ≥2 weeks, ≥3 weeks, ≥4 weeks, ≥5 weeks, ≥6 weeks, ≥7 weeks, ≥8 weeks, ≥3 months, ≥4 months, ≥5 months, ≥6 months, ≥7 months, 28 months, ≥9 months, ≥10 months, ≥11 months, ≥12 months, ≥18 months, 22 years, ≥3 years, ≥4 years, or ≥5 years, before symptoms are observed or observable.

[0055] Thus, by “early pancreatic cancer” (or “early stage pancreatic cancer”) we include pancreatic cancers that are of insufficient size and/or developmental stage to be diagnosed by conventional clinical methods. For example, by “early pancreatic cancer” or “early stage pancreatic cancer” we include or mean pancreatic cancers present at least 1 week before the pancreatic cancer is diagnosed or diagnosable by conventional clinical methods, for example, 22 weeks, ≥3 weeks, ≥4 weeks, ≥5 weeks, ≥6 weeks, ≥7 weeks, ≥8 weeks, 23 months, ≥4 months, ≥5 months, ≥6 months, ≥7 months, ≥8 months, ≥9 months, ≥10 months, ≥11 months, ≥12 months, ≥18 months, 22 years, 23 years, ≥4 years, or ≥5 years, before the pancreatic cancer is diagnosed or diagnosable by convention clinical methods.

[0056] The contemporary best practice for clinical pancreatic cancer diagnosis will be well known to the person of skill in the art, however, for a detailed review see Ducreux et al., 2015, ‘Cancer of the pancreas: ESMO Clinical Practice Guidelines for diagnosis, treatment and follow-up’ Annals of Oncology, 26 (Supplement 5): v56-v68 which is incorporated by reference herein.

[0057] Conventional clinical diagnoses (e.g., “diagnosed by conventional clinical methods”) include CT scan, ultrasound, endoscopic ultrasound, biopsy (histopathology) and/or physical examination (e.g., of the abdomen and, possibly, local lymph nodes). In one embodiment by “conventional clinical diagnoses” (and the like) we include the pancreatic cancer diagnosis procedures set out in Ducreux et al., 2015, supra.

[0058] Conventional clinical diagnoses (and the like) may include or exclude the use of molecular biomarkers present in bodily fluids (such as blood, serum, interstitial fluid, lymph, urine, mucus, saliva, sputum, sweat) and or tissues.

[0059] It will be appreciated by persons skilled in the art that the early pancreatic cancer may be a resectable pancreatic cancer.

[0060] By “resectable pancreatic cancer” we include or mean that the pancreatic cancer comprises or consists of tumours that are (and/or are considered) capable of being removed by surgery (i.e., are resectable). For example, the pancreatic cancer may be limited to the pancreas (i.e., it does not extend beyond the pancreas and/or have not metastasised).

[0061] In one embodiment, the early pancreatic cancer comprises tumours of 30 mm or less in all dimensions (i.e., in this embodiment individuals with early pancreatic cancer do not comprise pancreatic cancer tumours of greater than 30 mm in any dimension), for example, equal to or less than 29 mm, 28 mm, 27 mm, 26 mm, 25 mm, 24 mm, 22 mm, 21 mm, 20 mm, 19 mm, 18 mm, 17 mm, 16 mm, 15 mm, 14 mm, 13 mm, 12 mm, 11 mm, 10 mm, 9 mm, 8 mm, 7 mm, 6 mm, 5 mm, 4 mm, 3 mm, 2 mm, 1 mm or equal to or 0.1 mm in all dimensions. Alternatively or additionally, the pancreatic cancer tumours of 30 mm or less in all dimensions are at least 2 mm in one dimension. Alternatively or additionally, the pancreatic cancer tumours of 30 mm or less in all dimensions are at least 2 mm all dimensions.

[0062] It will be appreciated by persons skilled in the art that the methods of the invention will typically be used to provide an initial diagnosis, for example to identify an individual at risk of having or developing pancreatic cancer, after which further clinical investigations (such as biopsy testing, in vivo imaging and the like) may be performed to confirm the diagnosis.

[0063] Alternatively, however, the methods of the invention may be used as a stand-alone diagnostic test.

[0064] By “sample to be tested”, “test sample” or “control sample” we include a tissue or fluid 5 sample taken or derived from an individual, wherein the sample comprises endogenous proteins and/or nucleic acid molecules and/or carbohydrate moieties. Preferably the sample to be tested is provided from a mammal. The mammal may be any domestic or farm animal. Preferably, the mammal is a rat, mouse, guinea pig, cat, dog, horse or a primate. Most preferably, the mammal is human.

[0065] The sample to be tested in the methods of the invention may be a cell, tissue or fluid sample (or derivative thereof) comprising or consisting of blood (fractionated or unfractionated), plasma, plasma cells, serum, tissue cells or equally preferred, protein or nucleic acid derived from a cell or tissue sample. It will be appreciated that the test and control samples should be derived from the same species. Preferably, test and control samples are matched for age, gender and/or lifestyle.

[0066] In one embodiment, the sample is a pancreatic tissue sample. In an alternative or additional embodiment, the sample is a sample of pancreatic cells.

[0067] Alternatively, the sample may be a blood or serum sample.

[0068] In the methods of the invention, step (b) comprises or consists of measuring the presence and/or amount of one or more biomarker(s) listed in Table A, for example at least 2, 3, 4, 5, 6, 7, 8, 9, 10, 11, 12, 13, 14, 15, 16, 17, 18, 19, 20, 21, 22, 23, 24, 25, 26, 27, 28, or all 29 of the biomarkers listed in Table A.

[0069] Thus, step (b) may comprise, consist of or exclude measuring the expression of Disks large homolog 1 (DLG1). Alternatively or additionally, step (b) comprises, consists of or excludes measuring the expression of Protein kinase C zeta type (PRKCZ). Alternatively or additionally, step (b) comprises, consists of or excludes measuring the expression of vascular endothelial growth factor (VEGF). Alternatively or additionally, step (b) comprises, consists of or excludes measuring the expression of Complement C3 (C3). Alternatively or additionally, step (b) comprises, consists of or excludes measuring the expression of Plasma protease C1 inhibitor (C1INH). Alternatively or additionally, step (b) comprises, consists of or excludes measuring the expression of Interleukin-4 (IL-4). Alternatively or additionally, step (b) comprises, consists of or excludes measuring the expression of Interferon gamma (IFNγ). Alternatively or additionally, step (b) comprises, consists of or excludes measuring the expression of Complement C5 (C5). Alternatively or additionally, step (b) comprises, consists of or excludes measuring the expression of Protein-tyrosine kinase 6 (PTK6). Alternatively or additionally, step (b) comprises, consists of or excludes measuring the expression of Calcineurin B homologous protein 1 (CHP1). Alternatively or additionally, step (b) comprises, consists of or excludes measuring the expression of GTP-binding protein GEM (GEM). Alternatively or additionally, step (b) comprises, consists of or excludes measuring the expression of Aprataxin and PNK-like factor (APLF). Alternatively or additionally, step (b) comprises, consists of or excludes measuring the expression of Calcium/calmodulin-dependent protein kinase type IV (CAMK4). Alternatively or additionally, step (b) comprises, consists of or excludes measuring the expression of Membrane-associated guanylate kinase, WW and PDZ domain-containing protein 1 (MAGI). Alternatively or additionally, step (b) comprises, consists of or excludes measuring the expression of Serine/threonine-protein kinase MARK1 (MARK1). Alternatively or additionally, step (b) comprises, consists of or excludes measuring the expression of domain zinc finger protein 8 (PRDM8). Alternatively or additionally, step (b) comprises, consists of or excludes measuring the expression of Apolipoprotein A1 (APOA1). Alternatively or additionally, step (b) comprises, consists of or excludes measuring the expression of Cyclin-dependent kinase 2 (CDK2). Alternatively or additionally, step (b) comprises, consists of or excludes measuring the expression of HADH2 protein (HADH2). Alternatively or additionally, step (b) comprises, consists of or excludes measuring the expression of Interleukin-6 (IL-6). Alternatively or additionally, step (b) comprises, consists of or excludes measuring the expression of Complement C4 (C4). Alternatively or additionally, step (b) comprises, consists of or excludes measuring the expression of Visual system homeobox 2 (VSX2/CHX10). Alternatively or additionally, step (b) comprises, consists of or excludes measuring the expression of Intercellular adhesion molecule 1 (ICAM-1). Alternatively or additionally, step (b) comprises, consists of or excludes measuring the expression of Interleukin-13 (IL-13). Alternatively or additionally, step (b) comprises, consists of or excludes measuring the expression of Lewis x (Lewis x/CD15). Alternatively or additionally, step (b) comprises, consists of or excludes measuring the expression of Myomesin-2 (MYOM2). Alternatively or additionally, step (b) comprises, consists of or excludes measuring the expression of Properdin (Factor P). Alternatively or additionally, step (b) comprises, consists of or excludes measuring the expression of Sialyl Lewis x (Sialyl Lewis x). Alternatively or additionally, step (b) comprises, consists of or excludes measuring the expression of Lymphotoxin-alpha (TNFβ).

[0070] Thus, step (b) may comprise or consist of measuring the presence and/or amount of one or more biomarker(s) listed in:
[0071] (i) Table A, part (i), for example both of the biomarkers listed in Table A(i); and/or
[0072] (ii) Table A, part (ii), for example at least 2, 3, 4, 5, 6, 7 or all of the biomarkers listed in Table A(ii); and/or
[0073] (iii) Table A, part (iii), for example at least 2, 3, 4, 5, 6 or all of the biomarkers listed in Table A(iii); and/or
[0074] (iv) Table A, part (iv), for example at least 2, 3, 4, 5, 6, 7, 8, 9, 10, 11, 12 or all of the biomarkers listed in Table A(iv).

[0075] In a further preferred embodiment, the step (b) may comprise or consist of measuring the presence and/or amount of one or more of the following biomarker(s):
[0076] (i) the biomarkers listed in Table A, and Complement C1q (C1q; e.g. Uniprot ID P02745, 2746 and/or 2747);
[0077] (ii) the biomarkers listed in Table A, excluding Interleukin-6 (IL-6) and/or GTP-binding protein GEM (GEM); and/or
[0078] (iii) the biomarkers listed in Table A (excluding IL-6 and GEM) and C1q.

[0079] In this sense, Complement C1q may be considered as an additional biomarker within Table A, part (iv) and/or IL-6 and GEM may be considered as biomarkers within Table B (rather than Table A).

[0080] Thus, in alternative embodiments of all the aspects of the invention, references herein to the biomarkers in Table A may be regarded as being references to biomarkers listed in Table A (excluding IL-6 and GEM) and C1q. Likewise, references herein to the biomarkers in Table B may be regarded as being references to biomarkers listed in Table B plus IL-6 and GEM, but excluding C1q.

[0081] Advantageously, in the methods of the first aspect of the invention, step (b) comprises or consists of determining a biomarker signature of the test sample by measuring the presence and/or amount in the test sample of all of the following biomarkers:
[0082] DLG1, PRKCZ, VEGF, C3, C1INH, IL-4, IFNγ, C5, PTK6, CHP1, APLF, CAMK4, MAGI, MARK1, PRDM8, APOA1, CDK2, HADH2, C4, VSX2/CHX10, ICAM-1, IL-13, Lewis x/CD15, MYOM2, Factor P, Sialyl Lewis x, TNF and Complement C1q
[0083] (optionally including one or more biomarkers from Table B and/or IL-6 and/or GEM; see below),

[0084] wherein the presence and/or amount in the test sample of said biomarkers is indicative of the pancreatic cancer-associated disease state in the individual.

[0085] It will be appreciated that step (b) may additionally comprise measuring the presence and/or amount of one or more further biomarkers not listed in Table A, wherein the further biomarkers may provide additional diagnostic information.

[0086] For example, step (b) may comprise or consist of measuring the presence and/or amount of one or more biomarker(s) listed in Table B.

TABLE B

| Short name | Full name |
|---|---|
| AKT3 | RAC-gamma serine/threonine-protein kinase |
| Angiomotin | Angiomotin |
| ANM5 | Protein arginine N-methyltransferase 5 |
| APOA4 | Apolipoprotein A4 |
| ApoB-100 | Apolipoprotein B-100 |
| ARHGC | Rho guanine nucleotide exchange factor 12 |
| B-galactosidase | Beta-galactosidase |
| BIRC2 | Baculoviral IAP repeat-containing protein 2 |
| BTK | Tyrosine-protein kinase BTK |
| C1q | Complement C1q |
| CA 19-9 | CA 19-9 |
| CD40 | CD40 Arf-GAP with GTPase, ANK repeat and PH |
| CENTG1 | domain-containing protein 2 |
| CSNK1E | Casein kinase I isoform epsilon |
| Cystatin C | Cystatin C |
| DCNL1 | DCN1-like protein 1 |
| DLG2 | Disks large homolog 2 |
| DLG4 | Disks large homolog 4 |
| DPOLM | DNA-directed DNA/RNA polymerase mu |
| DUSP7 | Dual specificity protein phosphatase 7 |
| Eotaxin | Eotaxin |
| FASN | FASN protein |
| FER | Tyrosine-protein kinase Fer |
| GAK | GAK protein |
| GLP-1R | Glucagon-like peptide 1 receptor |
| GM-CSF | GM-CSF |
| GNAI3 | Guanine nucleotide-binding protein G(k) subunit alpha |
| GORS2 | Golgi reassembly-stacking protein 2 |
| GPRK5 | G protein-coupled receptor kinase 5 |
| Her2/ErbB2 | Receptor tyrosine-protein kinase erbB-2 |
| HLA-DR/DP | HLA-DR/DP |
| IgM | IgM |
| IL-10 | Interleukin-10 |
| IL-11 | Interleukin-11 |
| IL-12 | Interleukin-12 |
| IL-16 | Interleukin-16 |
| IL-18 | Interleukin-18 |
| IL-1a | Interleukin-1a |
| IL-1b | Interleukin-1b |
| IL-1ra | Interleukin-1ra |
| IL-2 | Interleukin-2 |
| IL-3 | Interleukin-3 |
| IL-5 | Interleukin-5 |
| IL-7 | Interleukin-7 |
| IL-8 | Interleukin-8 |
| IL-9 | Interleukin-9 |
| Integrin α-10 | Integrin alpha-10 |
| ITCH | E3 ubiquitin-protein ligase Itchy homolog |
| JAK3 | Tyrosine-protein kinase JAK3 |
| Keratin 19 | Keratin, type I cytoskeletal 19 |
| KIAA0882 | TBC1 domain family member 9 |
| KKCC1 | Calcium/calmodulin-dependent protein kinase 1 |
| KSYK | Tyrosine-protein kinase SYK |
| Leptin | Leptin |
| Lewis y | Lewis y |
| LIN7A | Protein lin-7 homolog A |
| MAP2K2 | Dual specificity mitogen-activated protein kinase 2 |
| MAP2K6 | Dual specificity mitogen-activated protein kinase 6 |
| MAPK1 | Mitogen-activated protein kinase 1 |
| MAPK8 | Mitogen-activated protein kinase 8 |
| MCP-1 | C-C motif chemokine 2 |
| MCP-4 | C-C motif chemokine 13 |
| Mucin-1 | Mucin-1 |
| NOS1 | Nitric oxide synthase, brain |
| OSBPL3 | Oxysterol-binding protein-related protein 3 |
| OTU6B | OTU domain-containing protein 6B |
| OTUB1 | Ubiquitin thioesterase OTUB1 |
| OTUB2 | Ubiquitin thioesterase OTUB2 |
| PAK4 | Serine/threonine-protein kinase PAK 4 |
| PAK5 | Serine/threonine-protein kinase PAK 7 |
| PARP6 | Partitioning defective 6 homolog beta |
| PGAM5 | Serine/threonine-protein phosphatase PGAM5, |
| | mitochondrial |
| PRKG2 | cGMP-dependent protein kinase 2 |
| Procathepsin W | Cathepsin W |
| PSA | Prostate-specific antigen |
| PTN13 | Tyrosine-protein phosphatase non-receptor type 13 |
| PTPN1 | Tyrosine-protein phosphatase non-receptor type 1 |
| PTPRD | Receptor-type tyrosine-protein phosphatase delta |
| PTPRJ | Receptor-type tyrosine-protein phosphatase eta |
| PTPRK | Receptor-type tyrosine-protein phosphatase kappa |
| PTPRN2 | Receptor-type tyrosine-protein phosphatase N2 |
| PTPRT | Receptor-type tyrosine-protein phosphatase T |
| RANTES | C-C motif chemokine 5 |
| RPS6KA2 | Ribosomal protein S6 kinase alpha-2 |
| SHC1 | SHC-transforming protein 1 |
| Sox11a | Transcription factor SOX-11 |
| SPDLY | Protein Spindly |
| TGF-b1 | Transforming growth factor beta-1 |
| TNF-a | Tumor necrosis factor |
| TNFRSF14 | Tumor necrosis factor receptor superfamily member 14 |
| TNFRSF3 | Tumor necrosis factor receptor superfamily member 3 |
| UBP7 | Ubiquitin carboxyl-terminal hydrolase 7 |
| UCHL5 | Ubiquitin carboxyl-terminal hydrolase isozyme L5 |
| UPF3B | Regulator of nonsense transcripts 3B |

[0087] For example, step (b) may comprise or consist of measuring the presence and/or amount of at least 2, 3, 4, 5, 6, 7, 8, 9, 10, 15, 20, 25, 30, 35, 40, 45, 50, 55, 60, 65, 70, 75, 80, 85, 90 or all of the biomarkers in Table B.

[0088] In one embodiment of the invention, the method is for the diagnosis of early stage pancreatic cancer (e.g., stage I and/or stage II PDAC versus healthy).

[0089] For example, step (b) may comprise or consist of measuring the presence and/or amount of one or more biomarker(s) listed in Table A, for example at least 2, 3, 4, 5, 6, 7, 8, 9, 10, 11, 12, 13, 14, 15, 16, 17, 18, 19, 20, 21, 22, 23, 24, 25, 26, 27, 28 or all of the biomarkers in Table A.

[0090] Alternatively, or in addition, step (b) may comprise or consist of measuring the presence and/or amount of one or more biomarker(s) listed in Table C, for example at least 2, 3, 4, 5, 6, 7, 8, 9, 10, 11, 12, 13, 14, 15, 16, 17, 18, 19, 20, 21, 22, 23, 24 or all of the biomarkers in Table C.

TABLE C
Selected biomarkers for classification between
non-cancerous and PDAC stages I and II

| Score Rank | Protein Name |
|---|---|
| 1 | Plasma protease C1 inhibitor |
| 2 | Interleukin-4 |
| 3 | Protein-tyrosine kinase 6 |
| 4 | Complement C3 |
| 5 | Serine/threonine-protein kinase MARK1 |
| 6 | HADH2 protein |
| 7 | Properdin |
| 8 | Complement C4 |
| 9 | Cyclin-dependent kinase 2 |
| 10 | Interferon gamma |
| 11 | Calcium/calmodulin-dependent protein kinase kinase 1 |
| 12 | Complement C5 |
| 13 | Vascular endothelial growth factor |
| 14 | Visual system homeobox 2 |
| 15 | PR domain zinc finger protein 8 |
| 16 | Intercellular adhesion molecule 1 |
| 17 | Ubiquitin carboxyl-terminal hydrolase isozyme L5 |
| 18 | Interleukin-6 |
| 19 | Myomesin-2 |
| 20 | Aprataxin and PNK-like factor |
| 21 | Apolipoprotein A1 |
| 22 | Regulator of nonsense transcripts 3B |
| 23 | Lumican |
| 24 | Interleukin-9 |
| 25 | C-C motif chemokine 13 |

[0091] In an alternative embodiment of the invention, the method is for the diagnosis of late stage pancreatic cancer (e.g., stage Ill and/or stage IV PDAC versus healthy).

[0092] For example, step (b) may comprise or consist of measuring the presence and/or amount of one or more biomarker(s) listed in Table D, for example at least 2, 3, 4, 5, 6, 7, 8, 9, 10, 11, 12, 13, 14, 15, 16, 17, 18, 19, 20, 21, 22, 23 or all of the biomarkers in Table D.

TABLE D
Selected biomarkers for classification between
non-cancerous and PDAC stages III and IV

| Score Rank | Protein Name |
|---|---|
| 1 | Plasma protease C1 inhibitor |
| 2 | Interleukin-4 |
| 3 | Complement C3 |
| 4 | Properdin |
| 5 | Complement C4 |
| 6 | Sialyl Lewis x |
| 7 | Calcineurin B homologous protein 1 |
| 8 | HADH2 protein |
| 9 | Protein-tyrosine kinase 6 |
| 10 | Apolipoprotein A1 |
| 11 | C-C motif chemokine 13 |
| 12 | Membrane-associated guanylate kinase, |
| | WW and PDZ domain-containing protein 1 |
| 13 | Lymphotoxin-alpha |
| 14 | Disks large homolog 1 |
| 15 | Protein kinase C zeta type |
| 16 | Interleukin-13 |
| 17 | Complement C5 |
| 18 | Serine/threonine-protein kinase MARK1 |
| 19 | GTP-binding protein GEM |
| 20 | IgM |
| 21 | Interleukin-8 |
| 22 | Vascular endothelial growth factor |
| 23 | Interleukin-6 |
| 24 | Interleukin-9 |

[0093] In a further embodiment of the invention, the method is for differentiating pancreatic cancer from chronic pancreatitis.

[0094] For example, step (b) may comprise or consist of measuring the presence and/or amount of one or more biomarker(s) listed in:
[0095] (i) Table A, part (i), for example both of the biomarkers listed in Table A(i); and/or
[0096] (ii) Table A, part (ii), for example at least 2, 3, 4, 5, 6, 7 or all of the biomarkers listed in Table A(ii); and/or
[0097] (iii) Table A, part (iii), for example at least 2, 3, 4, 5, 6 or all of the biomarkers listed in Table A(iii); and/or
[0098] (iv) Table A, part (iv), for example at least 2, 3, 4, 5, 6, 7, 8, 9, 10, 11, 12 or all of the biomarkers listed in Table A(iv).

[0099] It will be appreciated that step (b) may additionally comprise measuring the presence and/or amount of one or more further biomarkers not listed in Table A, wherein the further biomarkers may provide additional diagnostic information.

[0100] For example, step (b) may comprise or consist of measuring the presence and/or amount of one or more biomarker biomarkers selected from the group consisting of IL-4, C4, MAPK9, C1INH, VEGF, PTPRD, KCC4, TNF-α, C1q and BTK.

[0101] In a further embodiment of the invention, the method is for detecting intraductal papillary mucinous neoplasms (IPMN) in an individual. In other words, the methods may enable a patient with IPMN to be differentiated from an individual without IPMN, e.g. a healthy individual. In one embodiment, the IPMN lesions are malignant.

[0102] For example, step (b) may comprise or consist of measuring the presence and/or amount of one or more biomarker(s) listed in:
[0103] (i) Table A, part (i), for example both of the biomarkers listed in Table A(i); and/or
[0104] (ii) Table A, part (ii), for example at least 2, 3, 4, 5, 6, 7 or all of the biomarkers listed in Table A(ii); and/or
[0105] (iii) Table A, part (iii), for example at least 2, 3, 4, 5, 6 or all of the biomarkers listed in Table A(iii); and/or
[0106] (iv) Table A, part (iv), for example at least 2, 3, 4, 5, 6, 7, 8, 9, 10, 11, 12 or all of the biomarkers listed in Table A(iv).

[0107] It will be appreciated that step (b) may additionally comprise measuring the presence and/or amount of one or more further biomarkers, such as those listed in Tables B, C and/or D, wherein the further biomarkers may provide additional diagnostic information.

[0108] In one preferred embodiment of the first aspect of the invention, step (b) comprises measuring the presence and/or amount of all of the biomarkers listed in Table A, e.g. at the protein level. Use of this ‘full’ consensus biomarker signature allows the diagnosis of pancreatic cancer (e.g., PDAC) at any stage, including early stages of the disease.

[0109] It will be appreciated by persons skilled in the art that, in addition to measuring the biomarkers in a sample from an individual to be tested, the methods of the invention may also comprise measuring those same biomarkers in one or more control samples.

[0110] Thus, in one embodiment, the method further comprises or consists of the steps of:
[0111] (c) providing one or more (negative) control samples from:
   [0112] (i) an individual not afflicted with pancreatic cancer; and/or
   [0113] (ii) an individual afflicted with pancreatic cancer, wherein the sample was of a different stage to that of that the test sample; and/or
   [0114] (iii) an individual afflicted with chronic pancreatitis; and
[0115] (d) determining a biomarker signature of the one or more control samples by measuring the presence and/or amount in the control sample of the one or more biomarkers measured in step (b);

[0116] wherein the pancreatic cancer-associated disease state is identified in the event that the presence and/or amount in the test sample of the one or more biomarkers measured in step (b) is different from the presence and/or amount in the control sample of the one or more biomarkers measured in step (d).

[0117] By “is different to the presence and/or amount in a control sample” we include that the presence and/or amount of the one or more biomarker(s) in the test sample differs from that of the one or more control sample(s) (or to predefined reference values representing the same). Preferably, the presence and/or amount in the test sample differs from the presence or amount in one or more control sample(s) (or mean of the control samples) by at least ±5%, for example, at least ±6%, ±7%, ±8%, +9%, +10%, ±11%, ±12%, ±13%, ±14%, ±15%, ±16%, ±17%, ±18%, ±19%, ±20%, +21%, +22%, +23%, ±24%, ±25%, ±26%, ±27%, ±28%, ±29%, ±30%, ±31%, ±32%, ±33%, +34%, +35%, +36%, ±37%, ±38%, ±39%, ±40%, ±41%, ±42%, ±43%, ±44%, ±45%, ±41%, ±42%, ±43%, ±44%, ±55%, ±60%, ±65%, +66%, +67%, ±68%, ±69%, +70%, +71%, ±72%, +73%, +74%, ±75%, ±76%, ±77%, ±78%, ±79%, +80%, ±81%, ±82%, +83%, +84%, ±85%, +86%, +87%, ±88%, ±89%, ±90%, ±91%, ±92%, ±93%, ±94%, ±95%, ±96%, ±97%, ±98%, +99%, +100%, +125%, ±150%, ±175%, ±200%, ±225%, ±250%, ±275%, ±300%, ±350%, +400%, +500% or at least ±1000% of the one or more control sample(s) (e.g., the negative control sample).

[0118] Alternatively or additionally, the presence or amount in the test sample differs from the mean presence or amount in the control samples by at least ≥1 standard deviation from the mean presence or amount in the control samples, for example, ≥1.5, ≥2, ≥3, ≥4, ≥5, ≥6, ≥7, ≥8, ≥9, ≥10, ≥11, ≥12, ≥13, ≥14 or 215 standard deviations from the mean presence or amount in the control samples. Any suitable means may be used for determining standard deviation (e.g., direct, sum of square, Welford's), however, in one embodiment, standard deviation is determined using the direct method (i.e., the square root of [the sum the squares of the samples minus the mean, divided by the number of samples]).

[0119] Alternatively or additionally, by “is different to the presence and/or amount in a control sample” we include that the presence or amount in the test sample does not correlate with the amount in the control sample in a statistically significant manner. By “does not correlate with the amount in the control sample in a statistically significant manner” we mean or include that the presence or amount in the test sample correlates with that of the control sample with a p-value of >0.001, for example, >0.002, >0.003, >0.004, >0.005, >0.01, >0.02, >0.03, >0.04 >0.05, >0.06, >0.07, >0.08, >0.09 or >0.1. Any suitable means for determining p-value known to the skilled person can be used, including z-test, t-test, Student's t-test, f-test, Mann-Whitney U test, Wilcoxon signed-rank test and Pearson's chi-squared test.

[0120] In one embodiment, the method of the invention may further comprise or consist of the steps of:
[0121] (e) providing one or more (positive) control sample from;
   [0122] (i) an individual afflicted with pancreatic cancer (i.e., a positive control); and/or
   [0123] (ii) an individual afflicted with pancreatic cancer, wherein the sample was of the same stage to that of that the test sample; and
[0124] (f) determining a biomarker signature of the control sample by measuring the presence and/or amount in the control sample of the one or more biomarkers measured in step (b);

[0125] wherein the pancreatic cancer-associated disease state is identified in the event that the presence and/or amount in the test sample of the one or more biomarkers measured in step (b) corresponds to the presence and/or amount in the control sample of the one or more biomarkers measured in step (f).

[0126] Thus, the methods of the invention may comprise steps (c)+(d) and/or steps (e)+(f).

[0127] By “corresponds to the presence and/or amount in a control sample” we include that the presence and/or amount is identical to that of a positive control sample; or closer to that of one or more positive control sample than to one or more negative control sample (or to predefined reference values representing the same). Preferably the presence and/or amount is within ±40% of that of the one or more control sample (or mean of the control samples), for example, within ±39%, +38%, ±37%, ±36%, ±35%, ±34%, ±33%, ±32%, ±31%, ±30%, +29%, +28%, ±27%, ±26%, ±25%, +24%, ±23%, ±22%, ±21%, ±20%, ±19%, ±18%, ±17%, ±16%, ±15%, ±14%, ±13%, ±12%, ±11%, ±10%, ±9%, +8%, ±7%, ±6%, ±5%, ±4%, ±3%, ±2%, ±1%, ±0.05% or within 0% of the one or more control sample (e.g., the positive control sample).

[0128] Alternatively or additionally, the difference in the presence or amount in the test sample is 55 standard deviation from the mean presence or amount in the control samples, for example, ≤4.5, 54, ≤3.5, ≤3, 52.5, 52, 51.5, ≤1.4, ≤1.3, 51.2, ≤1.1, ≤1, ≤0.9, 0.8, ≤0.7, ≤0.6, ≤0.5, ≤0.4, 50.3, 50.2, 50.1 or 0 standard deviations from the from the mean presence or amount in the control samples, provided that the standard deviation ranges for differing and corresponding biomarker expressions do not overlap (e.g., abut, but no not overlap).

[0129] Alternatively or additionally, by “corresponds to the presence and/or amount in a control sample” we include that the presence or amount in the test sample correlates with the amount in the control sample in a statistically significant manner. By “correlates with the amount in the control sample in a statistically significant manner” we mean or include that the presence or amount in the test sample correlates with the that of the control sample with a p-value of ≤0.05, for example, 50.04, 50.03, 50.02, 50.01, 50.005, 50.004, 50.003, ≤0.002, ≤0.001, 50.0005 or ≤0.0001.

[0130] Differential expression (up-regulation or down regulation) of biomarkers, or lack thereof, can be determined by any suitable means known to a skilled person. Differential expression is determined to a p value of a least less than 0.05 (p=<0.05), for example, at least <0.04, <0.03, <0.02, <0.01, <0.009, <0.005, <0.001, <0.0001, <0.00001 or at least <0.000001. For example, differential expression may be determined using a support vector machine (SVM).

[0131] In one embodiment, the SVM is, or is derived from, the SVM described in Table 6, below.

[0132] It will be appreciated by persons skilled in the art that differential expression may relate to a single biomarker or to multiple biomarkers considered in combination (i.e., as a biomarker signature). Thus, a p value may be associated with a single biomarker or with a group of biomarkers. Indeed, proteins having a differential expression p value of greater than 0.05 when considered individually may nevertheless still be useful as biomarkers in accordance with the invention when their expression levels are considered in combination with one or more other biomarkers.

[0133] As exemplified in the accompanying Example, the expression of certain proteins in a tissue, blood, serum or plasma test sample may be indicative of pancreatic cancer in an individual. For example, the relative expression of certain serum proteins in a single test sample may be indicative of the presence of pancreatic cancer in an individual.

[0134] In an alternative or additional embodiment, the presence and/or amount in the test sample of the one or more biomarkers measured in step (b) may be compared against predetermined reference values representative of the measurements in steps (d) and/or (f), i.e., reference negative and/or positive control values.

[0135] As detailed above, the methods of the invention may also comprise measuring, in one or more negative or positive control samples, the presence and/or amount of the one or more biomarkers measured in the test sample in step (b).

[0136] For example, one or more negative control samples may be from an individual who was not, at the time the sample was obtained, afflicted with:
[0137] (a) a pancreatic cancer, for example adenocarcinoma (e.g., pancreatic ductal adenocarcinoma or tubular papillary pancreatic adenocarcinoma), pancreatic sarcoma, malignant serous cystadenoma, adenosquamous carcinoma, signet ring cell carcinoma, hepatoid carcinoma, colloid carcinoma, undifferentiated carcinoma, and undifferentiated carcinomas with osteoclast-like giant cells; and/or
[0138] (b) a non-cancerous pancreatic disease or condition, for example acute pancreatitis, chronic pancreatitis and autoimmune pancreatitis; and/or
[0139] (c) any other disease or condition.

[0140] Thus, the negative control sample may be obtained from a healthy individual.

[0141] Likewise, one or more positive control samples may be from an individual who, at the time the sample was obtained, was afflicted with a pancreatic cancer, for example adenocarcinoma (e.g., pancreatic ductal adenocarcinoma or tubular papillary pancreatic adenocarcinoma), pancreatic sarcoma, malignant serous cystadenoma, adenosquamous carcinoma, signet ring cell carcinoma, hepatoid carcinoma, colloid carcinoma, undifferentiated carcinoma, and undifferentiated carcinomas with osteoclast-like giant cells; and/or a non-cancerous pancreatic disease or condition, for example acute pancreatitis, chronic pancreatitis and autoimmune pancreatitis; and/or any other disease or condition.

[0142] In one preferred embodiment of the first aspect of the invention, the method is repeated on 5 the individual. Thus, steps (a) and (b) may be repeated using a sample from the same individual taken at different time to the original sample tested (or the previous method repetition). Such repeated testing may enable disease progression to be assessed, for example to determine the efficacy of the selected treatment regime and (if appropriate) to select an alternative regime to be adopted.

[0143] Thus, in one embodiment, the method is repeated using a test sample taken between 1 day to 104 weeks to the previous test sample(s) used, for example, between 1 week to 100 weeks, 1 week to 90 weeks, 1 week to 80 weeks, 1 week to 70 weeks, 1 week to 60 weeks, 1 week to 50 weeks, 1 week to 40 weeks, 1 week to 30 weeks, 1 week to 20 weeks, 1 week 15 to 10 weeks, 1 week to 9 weeks, 1 week to 8 weeks, 1 week to 7 weeks, 1 week to 6 weeks, 1 week to 5 weeks, 1 week to 4 weeks, 1 week to 3 weeks, or 1 week to 2 weeks.

[0144] Alternatively or additionally, the method may be repeated using a test sample taken every period from the group consisting of: 1 day, 2 days, 3 day, 4 days, 5 days, 6 days, 7 days, 10 days, 2 weeks, 3 weeks, 4 weeks, 5 weeks, 6 weeks, 7 weeks, 8 weeks, 9 weeks, 10 weeks, 15 weeks, 20 weeks, 25 weeks, 30 weeks, 35 weeks, 40 weeks, 45 weeks, 50 weeks, 55 weeks, 60 weeks, 65 weeks, 70 weeks, 75 weeks, 80 weeks, 85 weeks, 90 weeks, 95 weeks, 100 weeks, 104, weeks, 105 weeks, 110 weeks, 115 weeks, 120 weeks, 125 weeks and 130 weeks.

[0145] Alternatively or additionally, the method may be repeated at least once, for example, 2 times, 3 times, 4 times, 5 times, 6 times, 7 times, 8 times, 9 times, 10 times, 11 times, 12 times, 13 times, 14 times, 15 times, 16 times, 17 times, 18 times, 19 times, 20 times, 21 times, 22 times, 23, 24 times or 25 times.

[0146] Alternatively or additionally, the method is repeated continuously.

[0147] In one embodiment, the method is repeated until pancreatic cancer is diagnosed and/or staged in the individual using the methods of the present invention and/or conventional clinical methods (i.e., until confirmation of the diagnosis is made).

[0148] Suitable conventional clinical methods are well known in the art. For example, those methods described in Ducreux et al., 2015, ‘Cancer of the pancreas: ESMO Clinical Practice Guidelines for diagnosis, treatment and follow-up’ Annals of Oncology, 26 (Supplement 5): v56-v68 and/or Freelove & Walling, 2006, ‘Pancreatic Cancer: Diagnosis and Management’ American Family Physician, 73(3):485-492 which are incorporated herein by reference. Thus, the pancreatic cancer diagnosis may be confirmed using one or more method selected from the group consisting of computed tomography (preferably dual-phase helical computed tomography); transabdominal ultrasonography; endoscopic ultrasonography-guided fine-needle aspiration; endoscopic retrograde cholangio-pancreatography; positron emission tomography; magnetic resonance imaging; physical examination; and biopsy.

[0149] Alternatively and/or additionally, the pancreatic cancer diagnosis may be confirmed using known biomarker signatures for the diagnosis of pancreatic cancer. For example, the pancreatic cancer may be diagnosed with one or more biomarker or diagnostic method described in the group consisting of: WO 2008/117067 A9; WO 2012/120288 A2; and WO 2015/067969 A2.

[0150] In one preferred embodiment of the methods of the invention, step (a) comprises providing a serum sample from an individual to be tested and/or step (b) comprises measuring in the sample the expression of the protein or polypeptide of the one or more biomarker(s). Thus, a biomarker signature for the sample may be determined at the protein level.

[0151] In such an embodiment, step (b), (d) and/or step (f) may be performed using one or more first binding agents capable of binding to a biomarker (i.e., protein) listed in Table A. It will be appreciated by persons skilled in the art that the first binding agent may comprise or consist of a single species with specificity for one of the protein biomarkers or a plurality of different species, each with specificity for a different protein biomarker.

[0152] Suitable binding agents (also referred to as binding molecules) can be selected from a library, based on their ability to bind a given target molecule, as discussed below.

[0153] In one preferred embodiment, at least one type of the binding agents, and more typically all of the types, may comprise or consist of an antibody or antigen-binding fragment of the same, or a variant thereof.

[0154] Methods for the production and use of antibodies are well known in the art, for example see Antibodies: A Laboratory Manual, 1988, Harlow & Lane, Cold Spring Harbor Press, ISBN-13: 978-0879693145, Using Antibodies: A Laboratory Manual, 1998, Harlow & Lane, Cold Spring Harbor Press, ISBN-13: 978-0879695446 and Making and Using Antibodies: A Practical Handbook, 2006, Howard & Kaser, CRC Press, ISBN-13: 978-0849335280 (the disclosures of which are incorporated herein by reference).

[0155] Thus, a fragment may contain one or more of the variable heavy (V_{H}) or variable light (V_{L}) domains. For example, the term antibody fragment includes Fab-like molecules (Better et al (1988) Science 240, 1041); Fv molecules (Skerra et al (1988) Science 240, 1038); single-chain Fv (scFv) molecules where the V_{H} and V_{L} partner domains are linked via a flexible oligopeptide (Bird et al (1988) Science 242, 423; Huston et al (1988) Proc. Natl. Acad. Sci. USA 85, 5879) and single domain antibodies (dAbs) comprising isolated V domains (Ward et al (1989) Nature 341, 544).

[0156] For example, the binding agent(s) may be scFv molecules.

[0157] The term “antibody variant” includes any synthetic antibodies, recombinant antibodies or antibody hybrids, such as but not limited to, a single-chain antibody molecule produced by phage-display of immunoglobulin light and/or heavy chain variable and/or constant regions, or other immunointeractive molecule capable of binding to an antigen in an immunoassay format that is known to those skilled in the art.

[0158] A general review of the techniques involved in the synthesis of antibody fragments which retain their specific binding sites is to be found in Winter & Milstein (1991) Nature 349, 293-299.

[0159] Molecular libraries such as antibody libraries (Clackson et al, 1991, Nature 352, 624-628; Marks et al, 1991, J Mol Biol 222(3): 581-97), peptide libraries (Smith, 1985, Science 228(4705): 1315-7), expressed cDNA libraries (Santi et al (2000) J Mol Biol 296(2): 497-508), libraries on other scaffolds than the antibody framework such as affibodies (Gunneriusson et al, 1999, Appl Environ Microbiol 65(9): 4134-40) or libraries based on aptamers (Kenan et al, 1999, Methods Mol Biol 118, 217-31) may be used as a source from which binding molecules that are specific for a given motif are selected for use in the methods of the invention.

[0160] Conveniently, the binding agent(s) may be immobilised on a surface (e.g., on a multiwell plate or array); see Example below.

[0161] In one embodiment of the methods of the invention, step (b), (d) and/or step (f) is performed using an assay comprising a second binding agent capable of binding to the one or more biomarkers, the second binding agent comprising a detectable moiety. For example, an immobilised (first) binding agent may initially be used to ‘trap’ the protein biomarker on to the surface of a microarray, and then a second binding agent may be used to detect the ‘trapped’ protein.

[0162] The second binding agent may be as described above in relation to the (first) binding agent, such as an antibody or antigen-binding fragment thereof.

[0163] It will be appreciated by skilled person that the one or more biomarkers (e.g., proteins) in the test sample may be labelled with a detectable moiety, prior to performing step (b).

[0164] Likewise, the one or more biomarkers in the control sample(s) may be labelled with a detectable moiety.

[0165] Alternatively, or in addition, the first and/or second binding agents may be labelled with a detectable moiety.

[0166] By a “detectable moiety” we include the meaning that the moiety is one which may be detected and the relative amount and/or location of the moiety (for example, the location on an array) determined.

[0167] Suitable detectable moieties are well known in the art. For example, the detectable moiety may be selected from the group consisting of: a fluorescent moiety; a luminescent moiety; a chemiluminescent moiety; a radioactive moiety; an enzymatic moiety.

[0168] In one preferred embodiment, the detectable moiety is biotin.

[0169] Thus, the detectable moiety may be a fluorescent and/or luminescent and/or chemiluminescent moiety which, when exposed to specific conditions, may be detected.

[0170] For example, a fluorescent moiety may need to be exposed to radiation (i.e., light) at a specific wavelength and intensity to cause excitation of the fluorescent moiety, thereby enabling it to emit detectable fluorescence at a specific wavelength that may be detected.

[0171] Alternatively, the detectable moiety may be an enzyme which is capable of converting a (preferably undetectable) substrate into a detectable product that can be visualised and/or detected. Examples of suitable enzymes are discussed in more detail below in relation to, for example, ELISA assays.

[0172] In a further alternative, the detectable moiety may be a radioactive atom which is useful in 5 imaging. Suitable radioactive atoms include ^{99m}Tc and ¹²³I for scintigraphic studies. Other readily detectable moieties include, for example, spin labels for magnetic resonance imaging (MRI) such as ¹²³I again, ¹³¹I, ¹¹¹In, ¹⁹F, ¹³C, ¹⁵N, ¹⁷O, gadolinium, manganese or iron. Clearly, the agent to be detected (such as, for example, the one or more biomarkers in the test sample and/or control sample described herein and/or an antibody molecule for use in detecting a selected protein) must have sufficient of the appropriate atomic isotopes in order for the detectable moiety to be readily detectable.

[0173] Preferred assays for detecting serum or plasma proteins include enzyme linked immunosorbent assays (ELISA), radioimmunoassay (RIA), immunoradiometric assays (IRMA) and immunoenzymatic assays (IEMA), including sandwich assays using monoclonal and/or polyclonal antibodies. Exemplary sandwich assays are described by David et al in U.S. Pat. Nos. 4,376,110 and 4,486,530, hereby incorporated by reference. Antibody staining of cells on slides may be used in methods well known in cytology laboratory diagnostic tests, as well known to those skilled in the art.

[0174] Conveniently, the assay is an ELISA (Enzyme Linked Immunosorbent Assay) which typically involves the use of enzymes giving a coloured reaction product, usually in solid phase assays. Enzymes such as horseradish peroxidase and phosphatase have been widely employed. A way of amplifying the phosphatase reaction is to use NADP as a substrate to generate NAD which now acts as a coenzyme for a second enzyme system. Pyrophosphatase from Escherichia coli provides a good conjugate because the enzyme is not present in tissues, is stable and gives a good reaction colour. Chemi-luminescent systems based on enzymes such as luciferase can also be used.

[0175] ELISA methods are well known in the art, for example see The ELISA Guidebook (Methods in Molecular Biology), 2000, Crowther, Humana Press, ISBN-13: 978-0896037281 (the disclosures of which are incorporated by reference).

[0176] Alternatively, conjugation with the vitamin biotin is frequently used since this can readily be detected by its reaction with enzyme-linked avidin or streptavidin to which it binds with great specificity and affinity.

[0177] In one preferred embodiment, step (b), (d) and/or step (f) may be performed using an array.

[0178] Arrays per se are well known in the art. Typically, they are formed of a linear or two-dimensional structure having spaced apart (i.e. discrete) regions (“spots”), each having a finite area, formed on the surface of a solid support. An array can also be a bead structure where each bead can be identified by a molecular code or colour code or identified in a continuous flow. Analysis can also be performed sequentially where the sample is passed over a series of spots each adsorbing the class of molecules from the solution. The solid support is typically glass or a polymer, the most commonly used polymers being cellulose, polyacrylamide, nylon, polystyrene, polyvinyl chloride or polypropylene. The solid supports may be in the form of tubes, beads, discs, silicon chips, microplates, polyvinylidene difluoride (PVDF) membrane, nitrocellulose membrane, nylon membrane, other porous membrane, non-porous membrane (e.g. plastic, polymer, perspex, silicon, amongst others), a plurality of polymeric pins, or a plurality of microtitre wells, or any other surface suitable for immobilising proteins, polynucleotides and other suitable molecules and/or conducting an immunoassay. The binding processes are well known in the art and generally consist of cross-linking covalently binding or physically adsorbing a protein molecule, polynucleotide or the like to the solid support. By using well-known techniques, such as contact or non-contact printing, masking or photolithography, the location of each spot can be defined. For reviews see Jenkins, R. E., Pennington, S. R. (2001, Proteomics, 2, 13-29) and Lal et al (2002, Drug Discov Today 15; 7(18 Suppl):S143-9).

[0179] Typically, the array is a microarray. By “microarray” we include the meaning of an array of regions having a density of discrete regions of at least about 100/cm², and preferably at least about 1000/cm². The regions in a microarray have typical dimensions, e.g., diameters, in the range of between about 10-250 μm, and are separated from other regions in the array by about the same distance. The array may also be a macroarray or a nanoarray.

[0180] Once suitable binding molecules (discussed above) have been identified and isolated, the skilled person can manufacture an array using methods well known in the art of molecular biology.

[0181] Examples of array formats are described below in the Example and references cited therein; e.g., see Steinhauer et al., 2002; Wingren and Borrebaeck, 2008; Wingren et al., 2005, Delfani et al., 2016 (the disclosure of which are incorporated herein by reference).

[0182] Thus, in an exemplary embodiment the method comprises:
[0183] (i) labelling biomarkers present in the sample (e.g., serum) with biotin;
[0184] (ii) contacting the biotin-labelled proteins with an array comprising a plurality of scFv immobilised at discrete locations on its surface, the scFv having specificity for one or more of the proteins in Table A;
[0185] (iii) contacting the biotin-labelled proteins (immobilised on the surface-bound scFv) with a streptavidin conjugate comprising a fluorescent dye; and
[0186] (iv) detecting the presence of the dye at discrete locations on the array surface

[0187] wherein the expression of the dye on the array surface is indicative of the expression of a biomarker from Table A in the sample.

[0188] In an alternative embodiment, step (b), (d) and/or (f) comprises measuring the expression of a nucleic acid molecule encoding the one or more biomarkers.

[0189] The nucleic acid molecule may be a gene expression intermediate or derivative thereof, such as a mRNA or cDNA.

[0190] Thus, measuring the expression of the one or more biomarker(s) in step (b), (d) and/or (f) may be performed using a method selected from the group consisting of Southern hybridisation, Northern hybridisation, polymerase chain reaction (PCR), reverse transcriptase PCR (RT-PCR), quantitative real-time PCR (qRT-PCR), nanoarray, microarray, macroarray, autoradiography and in situ hybridisation.

[0191] For example, measuring the expression of the one or more biomarker(s) in step (b), (d) and/or (f) may be performed using one or more binding moieties, each individually capable of binding selectively to a nucleic acid molecule encoding one of the biomarkers identified in Table A.

[0192] Conveniently, the one or more binding moieties each comprise or consist of a nucleic acid molecule, such as DNA, RNA, PNA, LNA, GNA, TNA or PMO.

[0193] Advantageously, the one or more binding moieties are 5 to 100 nucleotides in length. For example, 15 to 35 nucleotides in length.

[0194] It will be appreciated that the nucleic acid-based binding moieties may comprise a detectable moiety.

[0195] Thus, the detectable moiety may be selected from the group consisting of: a fluorescent moiety; a luminescent moiety; a chemiluminescent moiety; a radioactive moiety (for example, a radioactive atom); or an enzymatic moiety.

[0196] Alternatively or additionally, the detectable moiety may comprise or consist of a radioactive atom, for example selected from the group consisting of technetium-99m, iodine-123, iodine-125, iodine-131, indium-111, fluorine-19, carbon-13, nitrogen-15, oxygen-17, phosphorus-32, sulphur-35, deuterium, tritium, rhenium-186, rhenium-188 and yttrium-90.

[0197] Alternatively or additionally, the detectable moiety of the binding moiety may be a fluorescent moiety.

[0198] In a further embodiment, the nucleic acid molecule is a circulating tumour DNA molecule (ctDNA).

[0199] Methods suitable for detecting ctDNA are now well-established; for example, see Lewis et al., 2016, World J Gastroenterol. 22(32): 7175-7185, and references cited therein (the disclosures of which are incorporated herein by reference).

[0200] As detailed above, the sample provided in step (a) (and/or in step (c) and/or (e)) may be selected from the group consisting of unfractionated blood, plasma, serum, tissue fluid, pancreatic tissue, milk, bile and urine.

[0201] Conveniently, the sample provided in step (a), (c) and/or (e) is serum.

[0202] By appropriate selection of some or all of the biomarkers in Table A, optionally in conjunction with one or more further biomarkers, the methods of the invention exhibit high predictive accuracy for diagnosis of pancreatic cancer.

[0203] Thus, the predictive accuracy of the method, as determined by an ROC AUC value, may be at least 0.50, for example at least 0.55, 0.60, 0.65, 0.70, 0.75, 0.80, 0.85, 0.90, 0.95, 0.96, 0.97, 0.98 or at least 0.99.

[0204] Thus, in one embodiment, the predictive accuracy of the method, as determined by an ROC AUC value, is at least 0.90.

[0205] In the methods of the invention, the ‘raw’ data obtained in step (b) (and/or in step (d) and/or (e)) undergoes one or more analysis steps before a diagnosis is reached. For example, the raw data may need to be standardised against one or more control values (i.e., normalised).

[0206] Typically, diagnosis is performed using a support vector machine (SVM), such as those available from http://cran.r-project.org/web/packages/e1071/index.html (e.g. e1071 1.5-24). However, any other suitable means may also be used.

[0207] Support vector machines (SVMs) are a set of related supervised learning methods used for classification and regression. Given a set of training examples, each marked as belonging to one of two categories, an SVM training algorithm builds a model that predicts whether a new example falls into one category or the other. Intuitively, an SVM model is a representation of the examples as points in space, mapped so that the examples of the separate categories are divided by a clear gap that is as wide as possible. New examples are then mapped into that same space and predicted to belong to a category based on which side of the gap they fall on.

[0208] More formally, a support vector machine constructs a hyperplane or set of hyperplanes in a high or infinite dimensional space, which can be used for classification, regression or other tasks. Intuitively, a good separation is achieved by the hyperplane that has the largest distance to the nearest training data points of any class (so-called functional margin), since in general the larger the margin the lower the generalization error of the classifier. For more information on SVMs, see for example, Burges, 1998, Data Mining and Knowledge Discovery, 2:121-167.

[0209] In one embodiment of the invention, the SVM is ‘trained’ prior to performing the methods of the invention using biomarker profiles from individuals with known disease status (for example, individuals known to have pancreatic cancer, individuals known to have acute inflammatory pancreatitis, individuals known to have chronic pancreatitis or individuals known to be healthy). By running such training samples, the SVM is able to learn what biomarker profiles are associated with pancreatic cancer. Once the training process is complete, the SVM is then able to determine whether or not the biomarker sample tested is from an individual with pancreatic cancer.

[0210] However, this training procedure can be by-passed by pre-programming the SVM with the necessary training parameters. For example, diagnoses can be performed according to the known SVM parameters using the SVM algorithm detailed in Table 6, based on the measurement of any or all of the biomarkers listed in Table A.

[0211] It will be appreciated by skilled persons that suitable SVM parameters can be determined for any combination of the biomarkers listed in Table A by training an SVM machine with the appropriate selection of data (i.e. biomarker measurements from individuals with known pancreatic cancer status). Alternatively, the data of the Examples and figures may be used to determine a particular pancreatic cancer-associated disease state according to any other suitable statistical method known in the art.

[0212] Preferably, the method of the invention has an accuracy of at least 60%, for example 61%, 62%, 63%, 64%, 65%, 66%, 67%, 68%, 69%, 70%, 71%, 72%, 73%, 74%, 75%, 76%, 77%, 78%, 79%, 80%, 81%, 82%, 83%, 84%, 85%, 86%, 87%, 88%, 89%, 90%, 91%, 92%, 93%, 94%, 95%, 96%, 97%, 98%, 99% or 100% accuracy.

[0213] Preferably, the method of the invention has a sensitivity of at least 60%, for example 61%, 62%, 63%, 64%, 65%, 66%, 67%, 68%, 69%, 70%, 71%, 72%, 73%, 74%, 75%, 76%, 77%, 78%, 79%, 80%, 81%, 82%, 83%, 84%, 85%, 86%, 87%, 88%, 89%, 90%, 91%, 92%, 93%, 94%, 95%, 96%, 97%, 98%, 99% or 100% sensitivity.

[0214] Preferably, the method of the invention has a specificity of at least 60%, for example 61%, 62%, 63%, 64%, 65%, 66%, 67%, 68%, 69%, 70%, 71%, 72%, 73%, 74%, 75%, 76%, 77%, 78%, 79%, 80%, 81%, 82%, 83%, 84%, 85%, 86%, 87%, 88%, 89%, 90%, 91%, 92%, 93%, 94%, 95%, 96%, 97%, 98%, 99% or 100% specificity.

[0215] By “accuracy” we mean the proportion of correct outcomes of a method, by “sensitivity” we mean the proportion of all pancreatic cancer positive sample that are correctly classified as positives, and by “specificity” we mean the proportion of all pancreatic cancer negative samples that are correctly classified as negatives.

[0216] Signal intensities may be quantified using any suitable means known to the skilled person, for example using Array-Pro (Media Cybernetics). Signal intensity data may be normalised (i.e., to adjust technical variation). Normalisation may be performed using any suitable method known to the skilled person. Alternatively or additionally, data are normalised using the empirical Bayes algorithm ComBat (Johnson et al., 2007).

[0217] Further statistical analysis of the refined data may be performed using methods well-known in the art, such as PCA, q-value calculation by ANOVA, and/or fold change calculation in Qlucore Omics Explorer.

[0218] As described above, a first (‘training’) data set may be used to identify a combination of biomarkers, e.g. from Table A, to serve as a biomarker signature for the diagnosis of pancreatic cancer. Mathematical analysis of the training data set may be performed using known algorithms (such as a backward elimination, or BE, algorithm) to determine the most suitable biomarker signatures. The predictive accuracy of a given biomarker combination (signature) can then be verified against a new (‘verification’) data set. Such methodology is described in detail in the Example.

[0219] It will be appreciated by persons skilled in the art that the individual(s) tested may be of any ethnicity or geographic origin. Alternatively, the individual(s) tested may be of a defined sub-population, e.g., based on ethnicity and/or geographic origin. For example, the individual(s) tested may be Caucasian and/or Chinese (e.g., Han ethnicity).

[0220] Typically, the sample(s) provided in step (a), (c) and/or (e) are provided before treatment of the pancreatic cancer (e.g., resection, chemotherapy, radiotherapy).

[0221] In one embodiment, the individual(s) being tested suffers from one or more condition selected from the group consisting of chronic pancreatitis, hereditary pancreatic ductal adenocarcinoma and Peutz-Jeghers syndrome.

[0222] The pancreatic cancer to be diagnosed may be selected from the group consisting of adenocarcinoma, adenosquamous carcinoma, signet ring cell carcinoma, hepatoid carcinoma, colloid carcinoma, undifferentiated carcinoma, and undifferentiated carcinomas with osteoclast-like giant cells. Preferably, the pancreatic cancer is a pancreatic adenocarcinoma. More preferably, the pancreatic cancer is pancreatic ductal adenocarcinoma, also known as exocrine pancreatic cancer.

[0223] One preferred embodiment of the first aspect of the invention includes the additional step, following positive diagnosis of the individual with a pancreatic cancer, of providing the individual with pancreatic cancer therapy.

[0224] Thus, a related aspect of the invention provides a method of treatment of an individual with a pancreatic cancer comprising the following steps:
[0225] (a) diagnosing an individual as having a pancreatic cancer using a method according to the first aspect of the invention; and
[0226] (b) treating the individual so diagnosed with a pancreatic cancer therapy (for example, see Thota et al., 2014, Oncology 28(1):70-4, the disclosures of which are incorporated herein by reference).

[0227] The pancreatic cancer therapy may be selected from the group consisting of surgery, chemotherapy, immunotherapy, chemoimmunotherapy, thermochemotherapy, radiotherapy and combinations thereof. For example, the pancreatic cancer therapy may be AC chemotherapy; Capecitabine and docetaxel chemotherapy (Taxotere®); CMF chemotherapy; Cyclophosphamide; EC chemotherapy; ECF chemotherapy; E-CMF chemotherapy (Epi-CMF); Eribulin (Halaven®); FEC chemotherapy; FEC-T chemotherapy; Fluorouracil (5FU); GemCarbo chemotherapy; Gemcitabine (Gemzar®); Gemcitabine and cisplatin chemotherapy (GemCis or GemCisplat); GemTaxol chemotherapy; Idarubicin (Zavedos®); Liposomal doxorubicin (DaunoXome®); Mitomycin (Mitomycin C Kyowa®); Mitoxantrone; MM chemotherapy; MMM chemotherapy; Paclitaxel (Taxol®); TAC chemotherapy; Taxotere and cyclophosphamide (TC) chemotherapy; Vinblastine (Velbe®); Vincristine (Oncovin®); Vindesine (Eldisine®); and Vinorelbine (Navelbine®).

[0228] Accordingly, a further aspect of the invention provides an antineoplastic agent (or combination thereof) for use in treating pancreatic cancer wherein the dosage regime thereof is determined based on the results of the method of the first aspect of the invention.

[0229] A related aspect of the invention provides the use of an antineoplastic agent (or combination thereof) in treating pancreatic cancer wherein the dosage regime thereof is determined based on the results of the method of the first aspect of the invention.

[0230] A further related aspect of the invention provides the use of an antineoplastic agent (or combination thereof) in the manufacture of a medicament for treating pancreatic cancer wherein the dosage regime thereof is determined based on the results of the method of the first aspect of the invention.

[0231] Thus, the present invention also provides a method of treating pancreatic cancer comprising administering to a patient an effective amount of an antineoplastic agent (or combination thereof) wherein the amount of antineoplastic agent (or combination thereof) effective to treat the pancreatic cancer is determined based on the results of the method of the first aspect of the invention.

[0232] In one embodiment, the antineoplastic agent comprises or consists of an alkylating agent (ATC code L01a), an antimetabolite (ATC code L01b), a plant alkaloid or other natural product (ATC code L01c), a cytotoxic antibiotic or a related substance (ATC code L01d), or another antineoplastic agent (ATC code L01x).

[0233] Hence, in one embodiment the antineoplastic agent comprises or consists of an alkylating agent selected from the group consisting of a nitrogen mustard analogue (for example cyclophosphamide, chlorambucil, melphalan, chlormethine, ifosfamide, trofosfamide, prednimustine or bendamustine) an alkyl sulfonate (for example busulfan, treosulfan, or mannosulfan) an ethylene imine (for example thiotepa, triaziquone or carboquone) a nitrosourea (for example carmustine, lomustine, semustine, streptozocin, fotemustine, nimustine or ranimustine) an epoxides (for example etoglucid) or another alkylating agent (ATC code L01ax, for example mitobronitol, pipobroman, temozolomide or dacarbazine).

[0234] In another embodiment the antineoplastic agent comprises or consists of an antimetabolite selected from the group consisting of a folic acid analogue (for example methotrexate, raltitrexed, pemetrexed or pralatrexate), a purine analogue (for example mercaptopurine, tioguanine, cladribine, fludarabine, clofarabine or nelarabine) or a pyrimidine analogue (for example cytarabine, fluorouracil (5-FU), tegafur, carmofur, gemcitabine, capecitabine, azacitidine or decitabine).

[0235] In a still further embodiment the antineoplastic agent comprises or consists of a plant alkaloid or other natural product selected from the group consisting of a vinca alkaloid or a vinca alkaloid analogue (for example vinblastine, vincristine, vindesine, vinorelbine or vinflunine), a podophyllotoxin derivative (for example etoposide or teniposide) a colchicine derivative (for example demecolcine), a taxane (for example paclitaxel, docetaxel or paclitaxel poliglumex) or another plant alkaloids or natural product (ATC code LOlcx, for example trabectedin).

[0236] In one embodiment the antineoplastic agent comprises or consists of a cytotoxic antibiotic or related substance selected from the group consisting of an actinomycine (for example dactinomycin), an anthracycline or related substance (for example doxorubicin, daunorubicin, epirubicin, aclarubicin, zorubicin, idarubicin, mitoxantrone, pirarubicin, valrubicin, amrubicin or pixantrone) or another (ATC code L01dc, for example bleomycin, plicamycin, mitomycin or ixabepilone).

[0237] In a further embodiment the antineoplastic agent comprises or consists of an antineoplastic agent selected from the group consisting of a platinum compound (for example cisplatin, carboplatin, oxaliplatin, satraplatin or polyplatillen) a methylhydrazine (for example procarbazine) a monoclonal antibody (for example edrecolomab, rituximab, trastuzumab, alemtuzumab, gemtuzumab, cetuximab, bevacizumab, panitumumab, catumaxomab or ofatumumab) a sensitizer used in photodynamic/radiation therapy (for example porfimer sodium, methyl aminolevulinate, aminolevulinic acid, temoporfin or efaproxiral) or a protein kinase inhibitor (for example imatinib, gefitinib, erlotinib, sunitinib, sorafenib, dasatinib, lapatinib, nilotinib, temsirolimus, everolimus, pazopanib, vandetanib, afatinib, masitinib or toceranib).

[0238] In a still further embodiment the antineoplastic agent comprises or consists of an antineoplastic agent selected from the group consisting of amsacrine, asparaginase, altretamine, hydroxycarbamide, lonidamine, pentostatin, miltefosine, masoprocol, estramustine, tretinoin, mitoguazone, topotecan, tiazofurine, irinotecan (camptosar), alitretinoin, mitotane, pegaspargase, bexarotene, arsenic trioxide, denileukin diftitox, bortezomib, celecoxib, anagrelide, oblimersen, sitimagene ceradenovec, vorinostat, romidepsin, omacetaxine mepesuccinate, eribulin or folinic acid.

[0239] In one embodiment the antineoplastic agent comprises or consists of a combination of one or more antineoplastic agent, for example, one or more antineoplastic agent defined herein. One example of a combination therapy used in the treatment of pancreatic cancer is FOLFIRINOX which is made up of the following four drugs:
[0240] FOL—folinic acid (leucovorin);
[0241] F—fluorouracil (5-FU);
[0242] IRIN—irinotecan (Camptosar); and
[0243] OX—oxaliplatin (Eloxatin).

[0244] Thus, by combining certain optional embodiments from the above-described methods, the invention may provide a method for diagnosing and treating pancreatic adenocarcinoma (e.g. stage I or II) in an individual, said method comprising:
[0245] (a) obtaining or providing a serum or plasma sample for a human patient;
[0246] (b) detecting whether one or more (e.g. all) of the protein biomarkers from Table A is/are present in the sample (e.g. by contacting the sample with one or more antibodies, or antigen-binding fragments thereof, each having specificity for one of the biomarkers and detecting binding of said antibodies or fragments to said biomarkers);
[0247] (c) diagnosing the patient with pancreatic adenocarcinoma (e.g. stage I or II) based on the amount of the one or more protein biomarkers in the sample; and
[0248] (d) administering an effective amount of a chemotherapeutic agent (e.g. gemcitabine) to the diagnosed patient and/or surgically removing the pancreas, in whole or in part, and/or administering radiotherapy.

[0249] It will be appreciated that step (b) may, for example, comprise determining the presence and/or amount in the sample of all the biomarkers listed in Table A (excluding IL-6 and GEM) together with C1q. This step may comprise the use of an array, as described herein, e.g. comprising a plurality of scFv having specificity the biomarkers immobilised on the surface of an array plate.

[0250] It will be appreciated that step (c) may comprise one or more further clinical investigations (such as testing a biopsy sample and/or in vivo imaging of the patient) in order to confirm or establish the diagnosis.

[0251] It will be appreciated that step (d) may comprise administration of combinations of chemotherapeutic agent and/or surgery and/or radiotherapy.

[0252] In one preferred embodiment, the patient is diagnosed with resectable pancreatic adenocarcinoma (e.g. stage I or II) and step (d) comprises surgical removal of the pancreas in whole or in part (e.g. using the Whipple procedure to remove the pancreas head or a total pancreatectomy) combined with chemotherapy (e.g. gemcitabine and/or 5-fluorouracil). It will be appreciated that the chemotherapy may be administered before and/or after the surgery.

[0253] In one embodiment, such methods permit the diagnosis of early stage pancreatic adenocarcinoma prior to the phenotypic presentation of the disease (i.e. before observable clinical symptoms develop). Thus, the methods may be used to diagnose pancreatic adenocarcinoma in asymptomatic patients, especially those at high risk of developing pancreatic cancer such as those with a family history of the disease, tobacco smokers, obese individuals, diabetics, and individuals with a chronic pancreatitis, chronic hepatitis B infection, cholelithiasis and/or an associated genetic predisposition (e.g. Peutz-Jeghers syndrome, familial atypical multiple mole melanoma syndrome, Lynch syndrome, BRCA1 mutations and/or BRCA2 mutations). Effective monitoring of such high risk individuals can enable early diagnosis of pancreatic adenocarcinoma and so greatly increase the chances of survival.

[0254] Another aspect of the invention provides a method for treating a pancreatic cancer-associated disease state in a subject comprising or consisting of administering a pancreatic cancer therapy to a subject, wherein said subject has a biomarker signature of the present invention indicating the presence of the pancreatic cancer-associated disease state in the subject. The pancreatic cancer therapy may be resection, chemotherapy, and/or radiotherapy. In one embodiment, the pancreatic cancer therapy comprises the administration of at least one antineoplastic agent, as described hereinabove.

[0255] The method may further comprise (e.g. prior to treating) measuring the presence and/or amount in a test sample of one or more biomarker(s) selected from the group defined in Table A (e.g. all the biomarker in Table A). The method may comprise determining a biomarker signature of a test sample from the subject (e.g. prior to treating), as described hereinabove.

[0256] Another aspect of the invention provides a method for detecting a biomarker signature of clinical significance (e.g. of diagnostic and/or prognostic value) in or of a biological sample (e.g. a serum sample), the method comprising steps (a) and (b) as defined above in relation to the first aspect of the invention. Preferably, the biomarker signature comprises or consists of all of the biomarkers in Table A.

[0257] A further aspect of the invention provides an array for diagnosing or determining a pancreatic cancer-associated disease state in an individual comprising an agent or agents (such as any of the above-described binding agents) for detecting the presence in a sample of one or more of the biomarkers defined in Table A.

[0258] Thus, the array is suitable for performing a method according to the first aspect of the invention.

[0259] The array comprises one or more binding agents capable (individually or collectively) of binding to one or more of the biomarkers defined in Table A, either at the protein level or the nucleic acid level.

[0260] In one preferred embodiment, the array comprises one or more antibodies, or antigen-binding fragments thereof, capable (individually or collectively) of binding to one or more of the biomarkers defined in Table A at the protein level. For example, the array may comprise scFv molecules capable (collectively) of binding to all of the biomarkers defined in Table A at the protein level.

[0261] In an alternative embodiment, the array comprises one or more antibodies, or antigen-binding fragments thereof, capable (individually or collectively) of binding to the following biomarkers:
[0262] DLG1, PRKCZ, VEGF, C3, C1INH, IL-4, IFNγ, C5, PTK6, CHP1, APLF, CAMK4, MAGI, MARK1, PRDM8, APOA1, CDK2, HADH2, C4, VSX2/CHX10, ICAM-1, IL-13, Lewis x/CD15, MYOM2, Factor P, Sialyl Lewis x, TNFβ and Complement C1q

[0263] (optionally including one or more biomarkers from Table B and/or IL-6 and/or GEM).

[0264] It will be appreciated that the array may comprise one or more positive and/or negative control samples. For example, conveniently the array comprises bovine serum albumin as a positive control sample and/or phosphate-buffered saline as a negative control sample.

[0265] Conveniently, the array comprises one or more, e.g. all, of the antibodies in Table 7.

[0266] Advantageously, the array comprises one or more, e.g. all, of the antibodies in Table 8.

[0267] A further aspect of the invention provides use of one or more biomarkers selected from the group defined in Table A as a biomarker for determining a pancreatic cancer associated disease states in an individual.

[0268] For example, all of the biomarkers (e.g. proteins) defined in Table A may be used together as a diagnostic signature for determining the presence of pancreatic cancer in an individual.

[0269] A further aspect of the invention provides a kit for diagnosing or determining a pancreatic cancer-associated disease state in an individual comprising:
[0270] (a) an array according to the invention, or components for making the same; and
[0271] (b) instructions for performing the method as defined above (e.g., in the first aspect of the invention).

[0272] A further aspect of the invention provides a use of one or more binding moieties to a biomarker as described herein (e.g. in Table A) in the preparation of a kit for diagnosing or determining a pancreatic cancer-associated disease state in an individual. Thus, multiple different binding moieties may be used, each targeted to a different biomarker, in the preparation of such as kit. In one embodiment, the binding moiety is an antibody or antigen-binding fragment thereof (e.g. scFv), as described herein.

[0273] A further aspect of the invention provides a method of treating pancreatic cancer in an individual comprising the steps of:
[0274] (a) determining a pancreatic cancer associated disease state according to the method defined in any the first aspect of the invention; and
[0275] (b) providing the individual with pancreatic cancer therapy.

[0276] For example, the pancreatic cancer therapy may be selected from the group consisting of surgery (e.g., resection), chemotherapy, immunotherapy, chemoimmunotherapy and thermochemotherapy (see above).

[0277] A further aspect of the invention provides a computer program for operating the methods the invention, for example, for interpreting the expression data of step (c) (and subsequent expression measurement steps) and thereby diagnosing or determining a pancreatic cancer-associated disease state. The computer program may be a programmed SVM. The computer program may be recorded on a suitable computer-readable carrier known to persons skilled in the art. Suitable computer-readable-carriers may include compact discs (including CD-ROMs, DVDs, Blu-ray and the like), floppy discs, flash memory drives, ROM or hard disc drives. The computer program may be installed on a computer suitable for executing the computer program.

[0278] Preferred, non-limiting examples which embody certain aspects of the invention will now be described, with reference to the following figures:

[0279] FIG. 1. Classification of individual PDAC stages in the Scandinavian cohort

[0280] Data shown are derived when all 349 antibodies were used to classify NC from patient samples of different PDAC stages, using SVM LOO cross validation. The results are presented with ROC-curves and their corresponding AUC-values for (A) stage I, (B) stage II, (C) stage III, and (D) stage IV PDAC.

[0281] FIG. 2. Classification of PDAC stages in the Scandinavian cohort, using biomarker signatures

[0282] Utilizing data from the Scandinavian study, predictive models based on frozen SVM were built. Two biomarker signatures were defined, using the backward elimination algorithm, for classification of (A) NC samples from PDAC stage I/II, and (B) PDAC stage III/IV, respectively. The results are presented as ROC-curves and their corresponding AUC-values.

[0283] FIG. 3. Validation of the consensus signature in stage I/II PDAC from the US cohort.

[0284] The consensus signature generated from the Scandinavian cohort was validated in the independent US cohort, by classifying (A) NC vs. PDAC stage I/II patients, and (B) PDAC stage I/II patients vs. chronic pancreatitis patients. The results are presented as representative ROC-curves and their corresponding AUC-values.

[0285] FIG. 4. Serum markers that are differentially expressed between different PDAC stages

[0286] Serum markers that were differentially expressed over progression from stage I to IV were identified by multigroup ANOVA. Presented are the most significant markers. Roman numerals indicate PDAC stage. *: p<0.05, q>0.05 and **: p<0.05, q<0.05

[0287] FIG. 5. Influence of diabetes on NC vs. PDAC classification accuracy

[0288] Decision values from an SVM model that had been trained on NC vs. PDAC were used to analyse differences between diabetic and non-diabetic PDAC samples in the discovery cohort. Significance values were calculated, using the Wilcoxon signed-rank test.

[0289] FIG. 6 Classification of IPMN stages from NC samples

[0290] The consensus signature was used to classify NC vs. the different IPMN stages. All IPMN samples from the US cohort were fed into an SVM model that had been trained on NC vs. PDAC. Significance values were calculated, using the Wilcoxon signed-rank test. The generated p-values were: NC vs. PDAC: 2.23×10⁻¹⁸; PDAC vs benign IPMN: 0.029; PDAC vs borderline IPMN: 0.284; PDAC vs malignant IPMN: 0.401.

### EXAMPLE

[0291] Abstract

[0292] Background

[0293] Pancreatic ductal adenocarcinoma (PDAC) has a poor prognosis with a 5-year survival of less than 10% due to diffuse symptoms leading to late stage diagnosis. The survival could increase significantly if localized tumours can be detected earlier. Multiparametric analysis of blood samples was used to derive a novel biomarker signature of early stage PDAC. The signature was developed from a large cohort of well-defined early stage (I/11) PDAC patients and subsequently validated in an independent patient cohort.

[0294] Methods

[0295] A recombinant antibody microarray platform was utilized to decipher a biomarker serum signature associated with PDAC. The discovery study was a case/control study from Scandinavia, consisting of 16 stage I, 132 stage II, 65 stage III, 230 stage IV patients and 888 controls. The identified biomarker signature was subsequently validated in an independent US case/control study cohort with 15 stage I, 75 stage II, 15 stage III, 38 stage IV patients and 219 controls.

[0296] Results

[0297] Using the Scandinavian case/control study, signatures were created discriminating samples derived from stage I/I and stage III/IV patients vs. controls with ROC-AUC values of 0.96 and 0.98, respectively. Subsequently, a consensus signature consisting of 29 biomarkers was generated based on all PDAC stages and control samples. This signature was then validated in an independent US case/control study and produced a ROC-AUC value of 0.96 using samples collected from PDAC stage I/II patients.

[0298] Conclusion

[0299] The validated serum signature detected early stage localized PDAC with high sensitivity and specificity, thus paving the way for earlier diagnosis.

### Abbreviations

[0300] ANOVA, Analysis of variance; AUC, Area under the curve; BE, Backward elimination; CP, Chronic pancreatitis; CV, Coefficient of variance; GO, gene ontology; IPMN, Intraductal papillary mucinous neoplasms (IPMN); LOO, Leave-one-out; MT-PBS, Phosphate buffered saline with 1% milk and 1% Tween-20; NC, Normal controls; PBS, Phosphate buffered saline; NPV, negative predictive value; PPV, positive predictive value; PBST, Phosphate buffered saline with 1% Tween-20; PCA, principal component analysis; PDAC, Pancreatic ductal adenocarcinoma; ROC, Receiver operating characteristic; RT, Room temperature; scFv, Single-chain fragment variable; SVM, Support vector machine

[0301] Introduction

[0302] In this study, PDAC stage I-IV patients were analysed in a large retrospective Scandinavian cohort followed by validation in an independent US cohort, aiming at identifying stage I/I1 associated PDAC biomarkers in a simple blood sample.

[0303] Methods

[0304] Study Designs

[0305] The two retrospective studies, performed on PDAC serum samples collected in Scandinavia and the US, were conducted according to the Standards for Reporting Diagnostic Accuracy Studies (STARD)²⁸. PDAC staging was performed according to the American Joint Committee on Cancer (AJCC) guidelines. Blood samples from patients with pancreatic cancer were collected and processed at time of diagnosis, before operation or start of chemotherapy. Blood samples from normal controls (NC) were collected, using the same standard operating procedure (SOP). In both cases, 5 μl of the serum samples was subsequently used for the analysis, utilizing a recombinant antibody microarray platform comprised of 349 human recombinant scFvs directed against 156 antigens (Table 5) (see Supplement Methods, below). The rationale was to target the systemic response to disease as well as the tumor secretome. Consequently, the selected biomarkers were mainly involved in immunoregulation.

[0306] Demographics of Study Cohorts

[0307] The Scandinavian cohort comprised 443 PDAC cases, 888 NC, and 8 intraductal papillary mucinous neoplasms (IPMN) (Table 1). The cases were diagnostic, and the overall resection rate was around 15%. Sixteen PDAC samples were from stage 1, 132 were from stage II, 65 were from stage III, and 230 were from stage IV patients (Table 1). Of the eight IPMN samples, five were benign and three were malignant.

[0308] The US cohort comprised 143 PDAC, 57 chronic pancreatitis (CP), and 20 IPMN cases as well as 219 NC (Table 1). Fifteen of the PDAC samples were from stage I, 75 were from stage II, 15 were from stage III, and 38 were from stage IV patients (Table 1). Of the 20 IPMN cases eight were benign, five were borderline, and seven were malignant. The cases were diagnostic, and the overall resection rate was 18-20%.

[0309] Results

[0310] Affinity proteomics offer some attractive features, such as delivering a highly sensitive assay using minute volumes of sample. The present approach was based on a recombinant antibody microarray platform comprised of 349 human recombinant scFvs directed against 156 antigens (Table 5). Since the focus was to interrogate the systemic response to PDAC, as well as its secretome, the selected antibodies targeted mainly antigens involved in immunoregulation. Two patient cohorts—one Scandinavian and one North American—including well defined early stage PDAC were utilized to identify and validate a biomarker signature for detection of stage I/I cancer.

[0311] First, to interrogate the robustness of the data set in the Scandinavian case/control discovery study, serum samples derived from patients with different PDAC stages were compared to matched healthy controls, using a LOO cross validation strategy. The results demonstrated that the different PDAC stages could be discriminated with high accuracy. The AUC values for NC vs. stages IA, IB, IIA, IIB, III, and IV were 0.91, 1.0, 0.99, 0.98, 0.99, and 0.98, respectively (FIG. 1). Of note, when using information derived from all antibodies on the array the resulting AUC levels, except for stage IA, reached 0.98 or higher.

[0312] Classifying PDAC Stage 1/11 with a Defined Biomarker Signature

[0313] In order to identify the smallest biomarker signature, discriminating PDAC stage I/II from NC with optimal predictive power, the SVM-based Backward Elimination algorithm was applied on the Scandinavian sample cohort^{26, 29}. Using this approach, biomarkers that do not improve the classification are eliminated resulting in identification of the signature providing the highest possible predictive power separating stage I/I vs. NC. This analysis resulted in a signature comprising only the highest ranked individual biomarkers (Table 4) and the obtained AUC value for stage I/I vs. NC was 0.96 (FIG. 2A), correlating to a specificity/sensitivity combination of 94/95% for NC vs. stage I/I. For comparative reasons, the obtained AUC value for stage III/IV vs. NC was 0.98 (FIG. 2B). These values are based on an investigation of the statistical robustness and classification model stability, where four randomly generated training/test sets were used, resulting in a mean AUC value of 0.963 (range 0.94-0.98) for the classification of NC vs. PDAC stage 1/I. The corresponding value for NC vs. stage III/IV was 0.985 (range 0.98-0.99). Of note, the highest predictive signature did not include e.g. CA19-9, a Sialyl Lewis A antigen commonly involved in analysis of PDAC, since it did not contribute with enough orthogonal information.

[0314] Validating the Detection of Early Stage 1/11 PDAC in an Independent Patient Cohort

[0315] To obtain the highest predictive accuracy in the validation study, the highest ranked biomarkers (Table 4) were combined to obtain a consensus signature, consisting of 29 biomarkers (Table 2). To validate the consensus signature for detection of early stage I/II PDAC patients, this signature was tested in a consecutive validation study, using samples derived from a completely independent US cohort. This validation analysis demonstrated a highly accurate discrimination of PDAC stage I/II vs. NC, with a ROC-AUC value of 0.963 (range 0.94-0.98), based on the three training sets (FIG. 3A). This correlates to an optimal specificity/sensitivity combination of 95/93% for stage I/II. Corresponding optimal ROC-AUC value for stage III/IV was 0.97 and for stage I-IV was 91/91%.

[0316] The capability to discriminate chronic pancreatitis from PDAC was also analysed, since differential diagnosis of pancreatitis vs. PDAC is a potential confounding clinical factor. Classification analysis of chronic pancreatitis from PDAC stage I/II samples resulted in an optimal ROC-AUC value of 0.84 (FIG. 3B).

[0317] Influence of Diabetes and Jaundice on Classification of Early Stage PDAC

[0318] The influence of diabetes on the classification accuracy was also investigated. In the Scandinavian cohort, 103 (23.3%) of the PDAC patients were diabetic (Table 3), while 38 (26.6%) of the PDAC patients in the US cohort had diabetes, at time of sample collection (Table 3). Newly onset diabetes (NOD), comprised 26.2% of the diabetic patients (n=37), in both cohorts. Decision values from the SVM model were used to analyze any significant differences between diabetic and non-diabetic PDAC samples in the discovery cohort. This analysis indicated that diabetes, including NOD, is not a confounding factor in the classification of NC vs. PDAC (p=0.47 and 0.96, respectively) (FIG. 3). The same approach applied on the validation cohort indicated that jaundice is not to a confounding factor (p=0.21).

[0319] Individual Serum Markers Associated with Different PDAC Stages

[0320] Individual biomarkers displaying a temporal expression pattern associated with progression from stage I to IV were also analyzed. By interrogating the data with multigroup ANOVA several biomarkers were identified that were differentially expressed in early vs. late stage PDAC patients. These included disks large homolog 1, PRDM8, and MAGI-1, which all displayed increased expression in later stages, while properdin, lymphotoxin-alpha, and IL-2 was more highly expressed in the early stages of PDAC (FIG. 4). Of note, all these biomarkers, except IL-2, were also present in the consensus signature (Table 2).

[0321] Classifying Intraductal Papillary Mucinous Neoplasm with the Validated Biomarker Signature

[0322] IPMNs frequently progress to invasive cancer if left untreated. Consequently, it is of clinical interest to detect such lesions so that they can be monitored by imaging, since this may present an opportunity for early resection of premalignant lesions. Consequently, the consensus signature was tested for its applicability to discriminate different stages of IPMN vs. NC. Twenty IPMN samples derived from the US patient cohort (Table 1) were classified, using the validated biomarker signature. Of note, the signature classified the borderline and malignant IPMNs as having a cancer profile, while benign IPMNs were classified as non-PDAC (p=0.029) (FIG. 6).

[0323] Discussion

[0324] The key finding in this study is that a proteomic multiparametric analysis, using minute volumes of serum could discriminate patients with early stage I/I PDAC from controls with high accuracy. The clinical utility and intended use of such a diagnostic approach would potentially be several fold, e.g. surveillance of (i) high-risk patients, such as hereditary PDAC, chronic pancreatitis, and Peutz-Jeghers syndrome patients; (ii) late onset diabetic patients over the age of 50 years, who have up to eight times increased risk for acquiring PDAC within the first three years of diabetes^{30, 31}, and (iii) patients with vague abdominal symptoms, back pain, and weight loss.

[0325] WHO has proposed that millions of cancer patients could be saved from premature death if diagnosed and treated earlier. To achieve this, more advanced diagnostic approaches have to be developed and applied to earlier detection of particularly lethal cancers such as PDAC. Despite the fact that the evolutionary trajectory of PDAC disease progression is discussed³²⁻³⁴, the available clinical data today supports the conclusion that earlier diagnosis leads to an overall survival benefit of asymptomatic patients, due to an increased frequency of resectable tumors^{4,8-11, 35}. To demonstrate clinical utility for early diagnosis for PDAC, the test has to display a low frequency of false positives, since this would otherwise inevitably lead to undesired consequences for the patient including anxiety, overtreatment, and increased costs. With this risk in mind, we have performed a large proteomic study on PDAC, including over 1700 case/control samples, and analysed 156 serum proteins derived either from the tumor secretome or from a systemic immune response. To determine clinical utility of a biomarker signature in a population, the prevalence of PDAC affects both the positive predictive value (PPV) (the probability that a positive test indicates disease) and the negative predictive value (NPV) (the probability that a negative test indicates absence of disease). In our US validation cohort, the results suggest that with a specificity as high as 99%, in patients with a higher risk than the general public for PDAC, e.g. first-degree relatives (prevalence 3.75%), and newly onset diabetic patients over 55 years of age (prevalence 1.0%)³⁶, the PPV/NPV would be 0.75/0.99 and 0.46/1.0, respectively. This signature, yielding the highest specificity/sensitivity for discriminating stage I/II from controls, did not include CA19-9, an antigen commonly involved in analysis of PDAC, either alone or in combination with other markers¹⁸. In fact, CA19-9 was analyzed on the antibody microarray but was not selected, since it did not contribute with enough orthogonal information during the backward elimination process.

[0326] Since newly onset diabetes in patients over 55 years of age has a significant increased risk of acquiring PDAC³⁷ this can be considered as an early indication of cancer, which could lead to early detection of asymptomatic, early stage PDAC³⁸. Diagnosis of diabetic patients with PDAC would consequently be of importance, since it would contribute to increased resectability and an increased survival in these patients. Consequently, we tested the consensus biomarker signature for its ability to discriminate between diabetic PDAC patients and PDAC without diagnosed diabetes. A support vector machine analysis, based on in total 141 diabetic patients with PDAC from both cohorts, of which 26.2% displayed newly onset diabetes, demonstrated no significant difference between samples derived from diabetic versus non-diabetic PDAC patients (FIG. 5). This implies that the validated biomarker signature potentially could contribute to clinically rule-out PDAC in diabetic patients, although this has to be demonstrated in a clinical study focusing on diabetic patients.

[0327] Differential diagnosis of PDAC vs. pancreatitis is sometimes difficult but in a previous study we demonstrated that late stage PDAC could be distinguished from different pancreatic inflammatory indications²⁷. A follow-up study was previously performed on different pancreatitis subtypes, such as acute, chronic, and autoimmune pancreatitis, where biomarkers associated with these subtypes could be identified and distinguished from PDAC³⁹. Even though the number of chronic pancreatitis samples is limited in the current study, we could demonstrate that chronic pancreatitis could be discriminated from early stage I/I PDAC, now with a ROC-AUC of 0.84 (FIG. 3B). Furthermore, correct classification of premalignant lesions of the pancreas (IPMN) represents a considerable clinical value. The present consensus biomarker signature could discriminate samples derived from patients with pathologically staged benign IPMNs from patients with stage I/II PDAC (FIG. 6), while borderline and malignant staged IPMNs were classified as cancer associated and could thus not be discriminated from PDAC. The limitation is that these results are based on a fairly low number of clinical samples but could potentially contribute to the detection of these difficult-to-diagnose lesions, when validated in a larger IPMN case/control study.

[0328] Relevant to cancer progression are gradual changes in the tumor microenvironment that can reflect back on the biomarker content in blood. Consequently, the data acquired here was used to identify markers whose expression pattern varied with stage progression, i.e. showed different levels in samples derived from early or late stage PDAC patients. Interestingly, all proteins displayed in FIG. 4, except IL-2, were present in the consensus signature (Table 2). Among the markers that displayed the most significantly increased expression from early to late stage PDAC was DLG1 (disks large homolog 1), a multi-functional scaffolding protein that interacts with e.g. APC, β-catenin, and PTEN to regulate cell proliferation, cytokinesis, migration, and adhesion. Although a candidate tumor suppressor DLG1 has been reported to exhibit oncogenic functions⁴⁰, potentially supported by the present upregulation in late stage PDAC. MAGI-1 (membrane-associated guanylate kinase, WW and PDZ domain-containing protein 1), also exhibited an increased expression in samples derived from late stage PDAC patients and is a scaffolding protein with proposed functions in epithelial cell-to-cell adhesion. Cancer related information in the literature is scarce, but MAGI-1 has been reported to inhibit both apoptosis and stimulate cell proliferation in HPV-induced malignancy⁴¹. PRDM8 (PR domain zinc finger protein 8), also known as BLIMP-1, was increased in samples from late stage patients. This DNA-binding protein regulates e.g. neural and steroid-related transcription, and is a regulator of tumorigenesis in pituitary adenomas, where it most likely contributes to increased tumor invasiveness⁴². This is consistent with our observation of its increased expression in late stage patient samples. Furthermore, lymphotoxin-alpha showed a lower expression in late stage samples. Lymphotoxin-alpha is produced by TH1 type T-cells to induce phagocyte binding to endothelial cells. Some polymorphisms of this protein contribute to increased risk for developing adenocarcinoma⁴³, although mapping previously has shown low protein expression in pancreatic cancer, a finding that could explain its decreased expression during PDAC progression in our study⁴⁴. The positive complement regulator properdin also showed decreased expression in samples from late stage PDAC patients. Properdin supports inflammation and phagocytosis via boosting of the alternative pathway of complement. Although inherently complex, complement activation is generally recognized as protective against cancer. Not only does inhibition of complement activation typically promote cancer cell immune evasion, it has also been shown to hamper the efficacy of cancer immunotherapy^{45, 46}. Decreased expression of properdin is consistent with the immune evasion observed in PDAC. Interleukin-2 (IL-2) exhibited decreased expression in samples from late stage patients. IL-2 stimulates growth and response of activated T-cells and is used in immunotherapy against e.g. renal carcinoma and malignant melanoma. Several studies show that IL-2 treatment in combination with conventional therapy can attenuate pancreatic cancer progression^{47, 48}. Further study of serum proteins that are associated with PDAC progression could potentially reveal mechanistic information on the biology of disease progression.

[0329] In summary, this study has succeeded in identifying and validating a biomarker signature based on two large case/control studies of PDAC patients. The findings show that this biomarker signature can detect samples derived from stage I/I PDAC patients with high accuracy, indicating the possibility to diagnose pancreatic cancer at an earlier stage, using a serum biomarker signature.

### REFERENCES

[0330] 1. Torre L A, Bray F, Siegel R L, Ferlay J, Lortet-Tieulent J, Jemal A. Global cancer statistics, 2012. CA Cancer J Clin. 2015; 65(2):87-108.
[0331] 2. Kamisawa T, Wood L D, Itoi T, Takaori K. Pancreatic cancer. Lancet. 2016; 388(10039):73-85.
[0332] 3. Rahib L, Fleshman J M, Matrisian L M, Berlin J D. Evaluation of Pancreatic Cancer Clinical Trials and Benchmarks for Clinically Meaningful Future Trials: A Systematic Review. JAMA Oncol. 2016; 2(9):1209-16.
[0333] 4. Ryan D P, Hong T S, Bardeesy N. Pancreatic adenocarcinoma. N Engl J Med. 2014; 371(22):2140-1.
[0334] 5. Rahib L, Smith B D, Aizenberg R, Rosenzweig A B, Fleshman J M, Matrisian L M. Projecting cancer incidence and deaths to 2030: the unexpected burden of thyroid, liver, and pancreas cancers in the United States. Cancer Res. 2014; 74(11):2913-21.
[0335] 6. Sohn T A, Yeo C J, Cameron J L, Koniaris L, Kaushal S, Abrams R A, et al. Resected adenocarcinoma of the pancreas-616 patients: results, outcomes, and prognostic indicators. J Gastrointest Surg. 2000; 4(6):567-79.
[0336] 7. Zhang H, Wu X, Zhu F, Shen M, Tian R, Shi C, et al. Systematic review and meta-analysis of minimally invasive versus open approach for pancreaticoduodenectomy. Surg Endosc. 2016; 30(12):5173-84.
[0337] 8. Matsuno S, Egawa S, Fukuyama S, Motoi F, Sunamura M, Isaji S, et al. Pancreatic Cancer Registry in Japan: 20 years of experience. Pancreas. 2004; 28(3):219-30.
[0338] 9. Gangi S, Fletcher J G, Nathan M A, Christensen J A, Harmsen W S, Crownhart B S, et al. Time interval between abnormalities seen on C T and the clinical diagnosis of pancreatic cancer: retrospective review of C T scans obtained before diagnosis. AJR Am J Roentgenol. 2004; 182(4):897-903.
[0339] 10. Pelaez-Luna M, Takahashi N, Fletcher J G, Chari S T. Resectability of presymptomatic pancreatic cancer and its relationship to onset of diabetes: a retrospective review of C T scans and fasting glucose values prior to diagnosis. Am J Gastroenterol. 2007; 102(10):2157-63.
[0340] 11. Vasen H, Ibrahim I, Ponce C G, Slater E P, Matthai E, Carrato A, et al. Benefit of Surveillance for Pancreatic Cancer in High-Risk Individuals: Outcome of Long-Term Prospective Follow-Up Studies From Three European Expert Centers. J Clin Oncol. 2016; 34(17):2010-9.
[0341] 12. Hanada K, Okazaki A, Hirano N, Izumi Y, Minami T, Ikemoto J, et al. Effective screening for early diagnosis of pancreatic cancer. Best Pract Res Clin Gastroenterol. 2015; 29(6):929-39.
[0342] 13. Chari S T, Kelly K, Hollingsworth M A, Thayer S P, Ahlquist D A, Andersen D K, et al. Early detection of sporadic pancreatic cancer: summative review. Pancreas. 2015; 44(5):693-712.
[0343] 14. Brentnall T A. Progress in the Earlier Detection of Pancreatic Cancer. J Clin Oncol. 2016; 34(17):1973-4.
[0344] 15. Okano K, Suzuki Y. Strategies for early detection of resectable pancreatic cancer. World J Gastroenterol. 2014; 20(32):11230-40.
[0345] 16. Locker G Y, Hamilton S, Harris J, Jessup J M, Kemeny N, Macdonald J S, et al. ASCO 2006 update of recommendations for the use of tumor markers in gastrointestinal cancer. J Clin Oncol. 2006; 24(33):5313-27.
[0346] 17. Galli C, Basso D, Plebani M. CA 19-9: handle with care. Clin Chem Lab Med. 2013; 51(7):1369-83.
[0347] 18. Borrebaeck C A. Precision diagnostics: moving towards protein biomarker signatures of clinical utility in cancer. Nat Rev Cancer. 2017; 17(3):199-204.
[0348] 19. Hanash S M, Pitteri S J, Faca V M. Mining the plasma proteome for cancer biomarkers. Nature. 2008; 452(7187):571-9.
[0349] 20. Radon T P, Massat N J, Jones R, Alrawashdeh W, Dumartin L, Ennis D, et al. Identification of a Three-Biomarker Panel in Urine for Early Detection of Pancreatic Adenocarcinoma. Clin Cancer Res. 2015; 21(15):3512-21.
[0350] 21. Shaw V E, Lane B, Jenkinson C, Cox T, Greenhalf W, Halloran C M, et al. Serum cytokine biomarker panels for discriminating pancreatic cancer from benign pancreatic disease. Mol Cancer. 2014; 13:114.
[0351] 22. Mayers J R, Wu C, Clish C B, Kraft P, Torrence M E, Fiske B P, et al. Elevation of circulating branched-chain amino acids is an early event in human pancreatic adenocarcinoma development. Nat Med. 2014; 20(10):1193-8.
[0352] 23. Jenkinson C, Elliott V L, Evans A, Oldfield L, Jenkins R E, O'Brien D P, et al. Decreased Serum Thrombospondin-1 Levels in Pancreatic Cancer Patients Up to 24 Months Prior to Clinical Diagnosis: Association with Diabetes Mellitus. Clin Cancer Res. 2016; 22(7): 1734-43.
[0353] 24. Brand R E, Nolen B M, Zeh H J, Allen P J, Eloubeidi M A, Goldberg M, et al. Serum biomarker panels for the detection of pancreatic cancer. Clin Cancer Res. 2011; 17(4):805-16.
[0354] 25. Kim J, Bamlet W R, Oberg A L, Chaffee K G, Donahue G, Cao X J, et al. Detection of eraly pancreatic ductal adenocarcinoma with thrombospondin-2 and CA19-9 blood markers.
[0355] Sci. Transl. Med. 2017; 12; 9(398) doi: 10.1126/scitranslmed.aah5583
[0356] 26. Gerdtsson A S, Malats N, Sail A, Real F X, Porta M, Skoog P, et al. A Multicenter Trial Defining a Serum Protein Signature Associated with Pancreatic Ductal Adenocarcinoma. Int J Proteomics. 2015; 2015:587250.
[0357] 27. Wingren C, Sandstrom A, Segersvard R, Carlsson A, Andersson R, Lohr M, et al. Identification of serum biomarker signatures associated with pancreatic cancer. Cancer Res. 2012; 72(10):2481-90.
[0358] 28. Bossuyt P M, Reitsma J B, Bruns D E, Gatsonis C A, Glasziou P P, Irwig L, et al. STARD 2015: an updated list of essential items for reporting diagnostic accuracy studies. BMJ. 2015; 351:h5527.
[0359] 29. Carlsson A, Wingren C, Kristensson M, Rose C, Ferno M, Olsson H, et al. Molecular serum portraits in patients with primary breast cancer predict the development of distant metastases. Proc Natl Acad Sci USA. 2011; 108(34):14252-7.
[0360] 30. Batabyal P, Vander Hoorn S, Christophi C, Nikfarjam M. Association of diabetes mellitus and pancreatic adenocarcinoma: a meta-analysis of 88 studies. Ann Surg Oncol. 2014; 21(7):2453-62.
[0361] 31. Wang F, Herrington M, Larsson J, Permert J. The relationship between diabetes and pancreatic cancer. Mol Cancer. 2003; 2:4.
[0362] 32. Lopez-Lazaro M. Pancreatic cancer formation is gradual, ResearchGate 2017, doi10.13140/RG.2.2.16865.92009
[0363] 33. Notta F, Chan-Seng-Yue M, Lemire M, Li Y, Wilson G W, Connor A A, et al. A renewed model of pancreatic cancer evolution based on genomic rearrangement patterns. Nature. 2016; 538(7625):378-82.
[0364] 34. Yachida S, Jones S, Bozic I, Antal T, Leary R, Fu B, et al. Distant metastasis occurs late during the genetic evolution of pancreatic cancer. Nature. 2010; 467(7319):1114-7.
[0365] 35. Shimizu Y, Yasui K, Matsueda K, Yanagisawa A, Yamao K. Small carcinoma of the pancreas is curable: new computed tomography finding, pathological study and postoperative results from a single institute. J Gastroenterol Hepatol. 2005; 20(10):1591-4.
[0366] 36. Chari S Y, Leibson C L. Rabe K G, Ransom J, De Andrade M, Petersen G M. Gastroenterology 2005, 129(2) 505-511.
[0367] 37. Aggarwal G, Rabe K G, Petersen G M, Chari S T. New-onset diabetes in pancreatic cancer: A study in the primary care setting. Pancreatology 2012; 12(2) 156-161.
[0368] 38. Pannala R, Basu A, Petersen G M, Chari S T. New-onset Diabetes: A potential clue to the early diagnosis of pancreatic cancer. Lancet Oncology 2009, 10(1) 88-95.
[0369] 39. Sandstrom A, Andersson R, Segersvard R, Lohr M, Borrebaeck C A, Wingren C. Serum proteome profiling of pancreatitis using recombinant antibody microarrays reveals disease-associated biomarker signatures. Proteomics Clin Appl. 2012; 6(9-10):486-96.
[0370] 40. Roberts S, Delury C, Marsh E. The PDZ protein discs-large (DLG): the ‘Jekyll and Hyde’ of the epithelial polarity proteins. FEBS J. 2012; 279(19):3549-58.
[0371] 41. Kranjec C, Massimi P, Banks L. Restoration of MAGI-1 expression in human papillomavirus-positive tumor cells induces cell growth arrest and apoptosis. J Virol. 2014; 88(13):7155-69.
[0372] 42. Lan X, Gao H, Wang F, Feng J, Bai J, Zhao P, et al. Whole-exome sequencing identifies variants in invasive pituitary adenomas. Oncol Lett. 2016; 12(4):2319-28.
[0373] 43. Huang Y, Yu X, Wang L, Zhou S, Sun J, Feng N, et al. Four genetic polymorphisms of lymphotoxin-alpha gene and cancer risk: a systematic review and meta-analysis. PLoS One. 2013; 8(12):e82519.
[0374] 44. Expression of LTA in cancer—The Human Protein Atlas 2017 [Available from: http://www.proteinatlas.orq/ENSG00000226979-LTA/cancer.]
[0375] 45. Mamidi S, Hone S, Kirschfink M. The complement system in cancer: Ambivalence between tumour destruction and promotion. Immunobiology. 2017; 222(1):45-54.
[0376] 46. Pio R, Corrales L, Lambris J D. The role of complement in tumor growth. Adv Exp Med Biol. 2014; 772:229-62.
[0377] 47. Grande C, Firvida J L, Navas V, Casal J. Interleukin-2 for the treatment of solid tumors other than melanoma and renal cell carcinoma. Anticancer Drugs. 2006; 17(1):1-12.
[0378] 48. Nobili C, Degrate L, Caprotti R, Franciosi C, Leone B E, Trezzi R, et al. Prolonged survival of a patient affected by pancreatic adenocarcinoma with massive lymphocyte and dendritic cell infiltration after interleukin-2 immunotherapy. Report of a case. Tumori. 2008; 94(3):426-30.

TABLE 1
Demographics of the Scandinavian and North American cohorts
(A) Scandinavian cohort

| Sample | AJCC | No. of | | | | | Tobacco use | Alcohol abuse |
|---|---|---|---|---|---|---|---|---|
| status | Stage | samples | Training set size* | Test set size* | Gender (Men/Women) | Median age (Range) | Y/N (%) | Y/N (%) |
| PDAC | IA | 10 | 8 | 2 | 5/5 | 68.5 (38-80) | 4/6 (40) | 0/10 (0) |
| | IB | 6 | 5 | 1 | 1/5 | 73.5 (51-80) | 3/3 (50) | 1/5 (17) |
| | IIA | 32 | 24 | 8 | 22/10 | 69 (38-88) | 12/20 (38) | 10/22 (31) |
| | IIB | 100 | 75 | 25 | 56/44 | 66 (37-86) | 74/26 (74) | 11/89 (11) |
| | III | 65 | 48 | 17 | 37/28 | 68 (49-86) | 42/23 (65) | 16/49 (25) |
| | IV | 230 | 172 | 58 | 132/98 | 68 (40-89) | 157/73 (68) | 58/172 (25) |
| IPMN | Benign | 5 | — | 5 | 3/2 | 71 (60-77) | 3/4 (43) | 4/1 (80) |
| | Malignant | 3 | — | 3 | 2/1 | 70 (64-70) | 3/0 (100) | 0/3 (0) |
| NC | | 888 | 666 | 222 | 512/376 | 68 (33-96) | 527/357 (60) | 212/676 (24) |

(B) US cohort

| Sample status | AJCC Stage | No. of samples | Training set size* | Test set size* | Gender (Men/Women) | Median age (Range) |
|---|---|---|---|---|---|---|
| PDAC | IA | 5 | 3 | 2 | 3/2 | 67 (56-73) |
| | IB | 10 | 7 | 3 | 7/3 | 69 (38-82) |
| | IIA | 27 | 18 | 9 | 16/11 | 65 (46-87) |
| | IIB | 48 | 32 | 16 | 24/24 | 67 (30-84) |
| | III | 15 | 10 | 5 | 8/7 | 66 (24-83) |
| | IV | 38 | 25 | 13 | 23/15 | 65.5 (35-83) |
| Chronic Pancreatitis | | 57 | 38 | 19 | 26/28 | 55.5 (32-81) |
| IPMN | Benign | 8 | — | 8 | 1/7 | 63 (46-75) |
| | Borderline | 5 | — | 5 | 2/3 | 74 (71-79) |
| | Malignant | 7 | — | 7 | 5/2 | 63 (54-79) |
| NC | | 219 | 146 | 73 | 115/104 | 63 (24-86) |

*Representative set sizes. For further information see section on bioinformatics.

TABLE 2
Consensus validation signature

Protein
Apolipoprotein A1
Aprataxin and PNK-like factor
Calcineurin B homologous protein 1
Calcium/calmodulin-dependent protein kinase type IV
Complement C3
Complement C4
Complement C5
Cyclin-dependent kinase 2
Disks large homolog 1
GTP-binding protein GEM
HADH2 protein
Intercellular adhesion molecule 1
Interferon gamma
Interleukin-13
Interleukin-4
Interleukin-6
Lewis x
Lymphotoxin-alpha
Membrane-associated guanylate kinase,
WW and PDZ domain-containing
protein 1
Myomesin-2
Plasma protease C1 inhibitor
PR domain zinc finger protein 8
Properdin
Protein kinase C zeta type
Protein-tyrosine kinase 6
Serine/threonine-protein kinase MARK1
Sialyl Lewis x
Vascular endothelial growth factor
Visual system homeobox 2

[0379] Supplemental Information

[0380] Methods

[0381] Demographics of Study Cohorts

[0382] The controls for the Scandinavian cohort were obtained from the Copenhagen General Population Study and were matched for gender, age, smoking habits, alcohol intake, and date of blood sampling. Two controls were matched per case. None of the controls had developed pancreatic cancer during a 5-year follow-up. Gender balance was 57:43(%) men vs. women in PDAC patients and 58:42(%) men vs. women in NC. The median age of the PDAC and NC subjects were both 68 years. Tobacco use was defined as current or past regular use, while alcohol abuse was defined as current or past abuse. Based on guidelines from the Danish Health Authority, the cut-offs for alcohol abuse were set at 168 g and 252 g alcohol per week for women and men, respectively. The ratio of tobacco users in the PDAC group, control group and all subjects combined were 66%, 60%, and 62%, respectively. The corresponding values for alcohol abuse were 22%, 24%, and 23%, respectively (Table 1). Of all PDAC patients in the Scandinavian cohort, 23.3% suffered from diabetes at the time of sample collection, while 25.0%, 28.7%, 26.2%, and 19.1% of stages I, 11, III, and IV PDAC patients, respectively, had known diabetes at the time of blood sampling (Table 3). Regardless of diabetic status, 70% of the tumors were located in the head, 20% in the body, and 10% in the pancreatic tail (Table 3). These proportions correspond well to the commonly reported data on tumor localization¹. All other parameters, including liver values and blood cell type counts, were comparable between disease stages (Table 3). Staging for the Scandinavian cohort was based on pathologic state of the resected tumor and lymph nodes and CT-scans (abdominal and thorax) in the resected patients and on biopsy and CT-scans for the non-resected patients.

[0383] The controls for the US cohort were collected either during a blood drive targeting healthy, non-cancer controls or during an office visit of non-cancer individuals and matched to PDAC patients regarding gender and age at time of sample collection. None of the controls had developed pancreatic cancer during a 5-year follow-up. Gender balance was 56:44(%) men vs. women in PDAC patients, 53:47(%) men vs. women in NC, 48:52(%) men vs. women in chronic pancreatitis (CP) patients, and 40:60(%) men vs. women in IPMN patients. The median age for PDAC, NC, CP, and IPMN subjects were 67, 63, 56, and 69 years, respectively. Staging for the US cohort was based on pathologic state, except in the case where there was no resection, i.e. typically late stage disease. For those patients, staging was based on biopsy or imaging depending on the clinical course. Of all PDAC patients in the US cohort, 26.6% suffered from diabetes at the time of sample collection, while 26.7%, 26.7%, 20.0%, and 28.9% of stages I, II, III, and IV PDAC patients, respectively, had known diabetes at the time of blood sampling (Table 3). IPMN diagnosis in both cohorts were based on surgically obtained pathology. Furthermore, the diagnosis of chronic pancreatitis was made by, 1) symptoms, i.e. pain and/or pancreatic insufficiency as determined by pancreatic elastase, following episodes of acute pancreatitis that were biochemically confirmed with amylase and lipase determinations and had abdominal imaging with CT scan that showed pancreatic and aperi-pancreatic inflammation, and 2) imaging—all patients had ERCP that showed pancreatic ductal changes consistent with chronic pancreatitis and all had CT and/or MRI imaging. All patients went to surgery for drainage procedures.

[0384] Sample Collection

[0385] The Scandinavian study, denoted the BIOPAC Study “BIOmarkers in patients with PAncreatic Cancer—can they provide new information of the disease and improve diagnosis and prognosis of the patients”, was approved by the Regional Ethics Committees of Copenhagen (VEK ref. KA-2006-0113) and the Danish Data Protection Agency (jr. no. 2006-41-6848, jr. no. 2012-58-004 and HGH-2015-027, I-suite 03960). The serum samples were collected between 2008 and 2014 at Herlev Hospital and Rigshospitalet, Copenhagen, Denmark. At the time of diagnosis, the blood was collected and allowed to clot for at least 30 minutes and then centrifuged at 2330 g for 10 minutes at 4° C. The serum was aliquoted and stored at −80° C. until further analysis. All samples were collected and processed, using the same SOP and analyzed for serum CA19-9, liver enzymes, and blood cell counts. Clinical data was gathered at time of sample collection.

[0386] The US study was approved by the Institutional Review Board of Oregon Health and Science University. Blood was collected prior to any treatment, allowed to clot for at least 30 minutes, and centrifuged at 1500 g for 10 minutes at 4° C. All samples were collected and processed, using the same SOP. The serum was aliquoted and stored at −80° C. until further analysis.

[0387] Data Acquisition, Quality Control, and Pre-Processing

[0388] Signal intensities from the antibody microarray were quantified, using the Array-Pro Analyzer software (Media Cybernetics, Rockville, Md., USA). Local background values were subtracted, and the adjusted intensity values were then used for subsequent data analysis. Data acquisition was performed by trained members of the research team who were blinded to sample classification and clinical data. Each data point represented a background-subtracted signal average of three replicate spots per antibody clone, unless the replicate coefficient of variance (CV) exceeded 15%. In such cases the replicate spot furthest from the mean value was omitted and the average signal of the two remaining replicates was used. The average CVs of replicates were 8.4% and 6.7% in the Scandinavian and US study, respectively.

[0389] The raw data from the quality control samples was evaluated on an individual antibody level for inter-slide and inter-day variance by CV-value analysis, box plotting, and 3D principal component analysis (PCA) with analysis of variance (ANOVA) filtering (Qlucore Omics Explorer, Qlucore AB, Lund, Sweden). Once data set homogeneity had been assured the quality control samples were removed from further analysis. Data from PDAC and control samples was transformed by log 2 followed by adjustment and normalization in two steps to reduce technical variation between days and slides. In the first step, day-to-day variation was addressed by applying ComBat (SVA package in the statistical software environment R), a method to adjust batch effects, using empirical Bayes frameworks where the batch covariate is known^{2, 3}. The covariate used was the day of microarray assay. In a second step, array-to-array variation was minimized, by calculating a scaling factor for each array. This factor was based on the 20% of antibodies with the lowest standard deviation of all samples and was calculated by dividing the intensity sum of these antibodies on each array with the average sum across all arrays⁴. The data is available from the corresponding author upon request.

[0390] Data Analysis

[0391] Two-group classifications were performed, using support vector machine (SVM) analysis in R. PCA, q-value calculation by ANOVA, and fold change calculation were performed, using Qlucore Omics Explorer. Multigroup ANOVA was used to analyze differential expression of individual protein markers in samples from the various PDAC stages included in the Scandinavian cohort. The performance of individual markers was evaluated with Student's t-test, Benjamini-Hochberg procedure for false discovery rate control (q-values), and fold changes. Sensitivities, specificities were calculated from SVM decision values. Positive (PPV), and negative (NPV) predictive values were calculated in relation to prevalence and lifetime risk for risk groups, such as newly onset diabetes (NOD) patients over 55 years of age and first-degree relatives for PDAC patients.

[0392] Before defining a biomarker signature that discriminated NC from PDAC Stage I/II, the power to classify individual PDAC stages was evaluated, using a leave-one-out (LOO) cross validation approach in R based on all antibodies⁵. In short, an SVM was designed in 5 which one data point was partitioned into a separate subset (test set) and the remaining data points were used as the training set. The process was repeated one sample at a time, the results were used to create a receiver operating characteristic (ROC) curve, and the corresponding area under the curve (AUC) value was calculated.

[0393] Next, to decipher a condensed biomarker signature, the data was divided into a training set including 3/4 of the samples (approximately 1000 samples) and a test set including 1/4 of the samples (approximately 340 samples). The ratio of case vs. control samples within the data sets was retained, but otherwise the sets were randomly generated. Four unique test/training sets were generated, using this approach. An individual sample was only included once in a test set. In order to identify the biomarker signatures, a Backward Elimination (BE) algorithm was applied to each training set in R, excluding one antibody at a time. For each BE iteration, the antibody with the highest Kullback-Leibler (KL) divergence value obtained in the classification analysis was eliminated. Based on KL divergence value analysis, the antibody combinations expressing the lowest values were used to design the predictive biomarker signature. Consequently, BE allows an unbiased selection of markers contributing orthogonal information, compared to other biomarkers⁶. Of note, the BE process sometimes results in that previously defined tumor markers, such as CA19-9 and Sialyl Lewis A in the case of PDAC, are not included in the signature, since they do not contribute with enough orthogonal information. The identified biomarker signature was then used to build a prediction model by frozen SVM in R, using only the training data set⁵. Furthermore, to avoid overfitting, the model was tested on the corresponding test set and its performance was assessed, using ROC curves and AUC values. To further minimize over-interpretation and to ensure robustness this process was performed on all four training and test sets. In this manner, a prediction model classifying NC vs. PDAC stage I/I patients was built and its performance was assessed, using ROC curves and AUC values. As a comparison, this was repeated also for samples derived from NC vs. PDAC stage III/IV patients.

[0394] Finally, to obtain a consensus signature with the highest predictive classification accuracy data from all classifications of NC vs. PDAC stage I/I patients as well as NC vs. PDAC stage III/IV were combined. The predictive accuracy of the consensus signature was then validated in an independent US sample cohort.

[0395] In the US study used for validation, the data was divided into three training/test sets of approximately 280 samples (training) and approximately 140 samples (test). The ratio of case vs. control samples within the data sets was retained, but otherwise the sets were randomly generated. The consensus signature from the Scandinavian study was used to build prediction models, using only the US training sets. The model was then tested on the corresponding US test set and the performance was assessed, using ROC curves and AUC values. To further minimize over-interpretation and to ensure robustness this process was performed on all three training and test sets. The same approach was used for the classification of chronic pancreatitis vs. PDAC samples, using a frozen SVM and the ROC-AUC value was calculated. Finally, the consensus signature was used to classify NC vs. IPMN patients. All IPMN samples in the validation cohort were fed into an SVM model that had been trained on NC vs. PDAC. To investigate whether bilirubin levels or diabetes were confounding factors in the antibody microarray analysis, patients with jaundice (49.7%) and diabetes (26.6%) were compared to patients without jaundice or without diabetes, respectively.

[0396] Sample Labeling

[0397] In both studies, the serum samples were labeled with biotin, using a protocol optimized for serum proteomes⁶⁻⁸. Briefly, 5 μl serum samples were diluted 1:45 in PBS to ˜2 mg protein/ml and labeled with 0.6 mM EZ-Link Sulfo-NHS-LC-Biotin (Thermo Fisher Scientific, Waltham, Mass., USA). Unbound biotin was removed by dialysis against PBS for 72 hours using a 3.5 kDa MWCO dialysis membrane (Thermo Fisher Scientific, Waltham, Mass., USA), changing buffer every 24 hours. The labeled serum samples were aliquoted and stored at −20° C. To control for labeling quality, reference serum samples (LGC Standards, Teddington, UK) were labeled alongside patient samples during each biotinylation round. The signals from these quality control (QC) samples were compared with the signals from a batch of identical previously labeled reference serum (see section on microarray assay) to verify that the process had worked as intended.

[0398] Antibody Microarray Production

[0399] Identical antibody microarrays were utilized in both studies. The arrays comprised 339 human recombinant scFvs directed against 156 known antigens (Table 5). The scFvs, selected and generated from phage display libraries, have previously been shown to display robust on-chip functionality^{7, 9-12}. Alongside the scFvs, two full length monoclonal antibodies against CA19-9 (Meridian Life Science, Memphis, Tenn., USA) were printed on the slides. The majority of the antibodies have previously been tested in array applications¹⁰⁻¹², and their specificity validated, using well-characterized control sera. Furthermore, orthogonal methods such as mass spectrometry, ELISA, MesoScaleDiscovery cytokine assay, cytometric bead assay, and spiking and blocking ELISA have been utilized for assessing antibody specificities¹³⁻¹⁵. The selected scFvs were against serum proteins mostly involved in immune regulation and/or cancer biology.

[0400] His-tagged scFvs were produced in E. coli and purified from the periplasm, using a magnetic Ni-particle protein purification system (MagneHis, Promega, Madison, Wis., USA). The elution buffer was exchanged for PBS, using Zeba 96-well spin plates (Pierce, Rockford, Ill., USA). Protein yield was measured using NanoDrop spectrophotometer (Thermo Fisher Scientific, Waltham, Mass., USA). Protein purity was checked by 10% Bis-Tris SDS-PAGE (Invitrogen, Carlsbad, Calif., USA). Antibody microarrays were produced on black MaxiSorp slides (NUNC, Roskilde, Denmark), using a non-contact printer (SciFlexarrayer S11, Scienion, Berlin, Germany). Prior to printing, optimal printing concentration was defined for each scFv clone⁹. To allow for subsequent QC functions, 0.1 mg/ml Cadaverine Alexa Fluor-555 (Life Technologies, Carlsbad, Calif., USA) was added to the printing buffer. Fourteen identical arrays were printed on each slide in two columns of seven arrays. Each array consisted of 34×36 spots with 200 □m spot-to-spot center distance and a spot diameter of 140 Em. Each array consisted of three identical segments separated by rows of BSA-biotin spots. Each antibody was printed in three replicates with one replicate in each segment. Two additional rows of biotin-BSA spots flanked each subarray, one above the subarray and one below it. Nine negative control spots (PBS) were printed in each replicate segment. Ten slides (140 microarrays) were printed, for each round of analysis. In the Scandinavian discovery study a total of 152 slides were printed over 16 printing days. In the validation study a total of 48 slides were printed over five printing days. The slides were stored for eight days in room temperature (RT) before microarray assay.

[0401] Microarray Assay

[0402] Ten samples were analyzed on each slide. The positioning of the samples was randomized but the ratio of healthy and PDAC samples on each slide was approximately the same for the cohort as a whole. Four positions on each slide were used for QC samples; three for reference sera (two from LGC Standards, Teddington, UK, and one from SeraCare Life Sciences, Milford, Mass., USA) and one for a sample containing a mix of aliquots from healthy and cancer samples included in the study. Each microarray slide was mounted in a hybridization gasket (Schott, Mainz, Germany) and blocked with 1% w/v milk, 1% v/v Tween-20 in sterile D-PBS (MT-PBS) at RT for 1 hour with constant agitation. Meanwhile, aliquots of labeled serum samples were thawed on ice and subsequently diluted 1:10 in MT-PBS. The slides were washed four times with 0.05% Tween-20 in sterile D-PBS (PBST) followed by addition of diluted serum samples to the wells of the gasket. Samples were incubated on the slides at RT for 2 hours with constant agitation. Next, the slides were washed four times with PBST, incubated with 1 □g/ml Streptavidin Alexa-647 (Life Technologies Carlsbad, Calif., USA) in MT-PBS at RT for 1 hour with constant agitation, and again washed four times with PBST. Finally, the slides were dismounted from the hybridization gaskets, immersed in dH₂0 and dried under a stream of N₂. The slides were immediately scanned with a confocal microarray scanner (LS Reloaded, Tecan, Mannedorf, Switzerland) at 10 □m resolution, first at 635 nm, then at 532 nm. The first scan image detected the Alexa-647 (streptavidin) signal and was used for quantification of spot signal intensities. The second scan image measured the Alexa-555 (cadaverine) signal and was used for quality control purposes.

### REFERENCES (FOR SUPPLEMENTAL INFORMATION)

[0403] 1. Stark A, Eibl G. Pancreatic Ductal Adenocarcinoma 2015 [Available from: https://www.pancreapedia.org/reviews/pancreatic-ductal-adenocarcinoma.
[0404] 2. Johnson W E, Li C, Rabinovic A. Adjusting batch effects in microarray expression data using empirical Bayes methods. Biostatistics. 2007; 8(1):118-27.
[0405] 3. Leek J T, Johnson W E, Parker H S, Fertig E J, Jaffe A E, Storey J D. sva: Surrogate Variable Analysis. R package version 3.22.0. 2016.
[0406] 4. Delfani P, Dexlin Mellby L, Nordstrom M, Holmer A, Ohlsson M, Borrebaeck C A, et al. Technical Advances of the Recombinant Antibody Microarray Technology Platform for Clinical Immunoproteomics. PLoS One. 2016; 11(7):e0159138.
[0407] 5. Carlsson A, Wingren C, Kristensson M, Rose C, Ferno M, Olsson H, et al. Molecular serum portraits in patients with primary breast cancer predict the development of distant metastases. Proc Natl Acad Sci USA. 2011; 108(34):14252-7.
[0408] 6. Carlsson A, Persson O, Ingvarsson J, et al. Plasma proteome profiling reveals biomarker patterns associated with prognosis and therapy selection in glioblastoma multiforme patients. Proteomics Clin Appl 2010; 4:591-602.
[0409] 7. Gerdtsson A S, Malats N, Sail A, et al. A Multicenter Trial Defining a Serum Protein Signature Associated with Pancreatic Ductal Adenocarcinoma. Int J Proteomics 2015; 2015:587250.
[0410] 8. Wingren C, Ingvarsson J, Dexlin L, Szul D, Borrebaeck C A. Design of recombinant antibody microarrays for complex proteome analysis: choice of sample labeling-tag and solid support. Proteomics 2007; 7:3055-65.
[0411] 9. Delfani P, Dexlin Mellby L, Nordstrom M, et al. Technical Advances of the Recombinant Antibody Microarray Technology Platform for Clinical Immunoproteomics. PLoS One 2016; 11:e0159138.
[0412] 10. Steinhauer C, Wingren C, Hager A C, Borrebaeck C A. Single framework recombinant antibody fragments designed for protein chip applications. Biotechniques 2002; Suppl:38-45.
[0413] 11. Wingren C, Borrebaeck C A. Antibody microarray analysis of directly labelled complex proteomes. Curr Opin Biotechnol 2008; 19:55-61.
[0414] 12. Wingren C, Steinhauer C, Ingvarsson J, Persson E, Larsson K, Borrebaeck C A. Microarrays based on affinity-tagged single-chain Fv antibodies: sensitive detection of analyte in complex proteomes. Proteomics 2005; 5:1281-91.
[0415] 13. Borrebaeck C A, Wingren C. Recombinant antibodies for the generation of antibody arrays. Methods Mol Biol 2011; 785:247-62.
[0416] 14. Olsson N, Wallin S, James P, Borrebaeck C A, Wingren C. Epitope-specificity of recombinant antibodies reveals promiscuous peptide-binding properties. Protein Sci 2012; 21:1897-910.
[0417] 15. Soderlind E, Strandberg L, Jirholt P, et al. Recombining germline-derived CDR sequences for creating diverse single-framework antibody libraries. Nat Biotechnol 2000; 18:852-6.

TABLE 3
Clinical data
Diabetes and jaundice in the Scandinavian and US cohorts

| | Diabetes | Diabetes | Jaundice |
|---|---|---|---|
| AJCC stage | Scandinavian cohort (%) | US cohort (%) | US cohort (%) |
| IA | 2/10 (20.0) | 1/5 (20.0) | 1/5 (20.0) |
| IB | 2/6 (33.3) | 3/10 (30.0) | 4/10 (40.0) |
| IIA | 7/32 (21.9) | 8/27 (29.6) | 13/27 (48.1) |
| IIB | 31/100 (31.0) | 12/48 (25.0) | 32/48 (66.7) |
| III | 17/65 (26.2) | 3/15 (20.0) | 6/15 (40.0) |
| IV | 44/230 (19.1) | 11/38 (28.9) | 15/38 (39.5) |
| I-IV | 103/443 (23.3) | 38/143 (26.6) | 71/143 (49.7) |

Tumor localization in the Scandinavian cohort

| AJCC stage | Head (%) | Body (%) | Tail (%) | Diffuse (%) | Unknown (%) |
|---|---|---|---|---|---|
| IA | 6 (60) | 3 (30) | — | — | 1 (10) |
| IB | 5 (83) | 1 (17) | — | — | — |
| IIA | 25 (78) | 1 (3) | 4 (13) | 2 (6) | — |
| IIB | 84 (84) | 10 (10) | 3 (3) | 2 (2) | 1 (1) |
| III | 43 (66) | 18 (28) | 1 (2) | 2 (3) | 1 (2) |
| IV | 136 (59) | 46 (20) | 34 (15) | 5 (2) | 9 (4) |

Clinical parameters in the Scandinavian cohorts

| AJCC | CA 19-9 | BASP | Bilirubin | ALAT | ASAT | Platelets | Leukocyte | Neutrophil |
|---|---|---|---|---|---|---|---|---|
| stage | (U/ml) | (U/l) | (μM) | (U/l) | (IU/l) | (PLT/nl) | (WBC/nl) | (ANC/nl) |
| IA | 59 | 77 | 8 | 15 | 29 | 284 | 12.2 | 18.7 |
| IB | 36 | 107 | 8 | 22 | 36.5 | 375 | 6.6 | 9 |
| IIA | 458 | 209 | 28 | 94 | 72 | 300 | 10 | 10 |
| IIB | 217 | 183 | 20 | 59 | 38 | 268 | 10 | 7 |
| III | 601 | 120 | 13 | 35 | 34.5 | 282.5 | 7.7 | 5.4 |
| IV | 1980 | 175 | 13 | 35 | 39 | 314 | 9 | 6.3 |

TABLE 4
Biomarker signatures discriminating
PDAC stages I/II and III/IV from NC
NC vs. PDAC stage I/II

| | |
|---|---|
| 1. | Plasma protease C1 inhibitor |
| 2. | Interleukin-4 |
| 3. | Protein-tyrosine kinase 6 |
| 4. | Complement C3 |
| 5. | Serine/threonine-protein kinase MARK1 |
| 6. | HADH2 protein |
| 7. | Properdin |
| 8. | Complement C4 |
| 9. | Cyclin-dependent kinase 2 |
| 10. | Interferon gamma |
| 11. | Calcium/calmodulin-dependent protein kinase 1 |
| 12. | Complement C5 |
| 13. | Vascular endothelial growth factor |
| 14. | Visual system homeobox 2 |
| 15. | PR domain zinc finger protein 8 |
| 16. | Intercellular adhesion molecule 1 |
| 17. | Ubiquitin carboxyl-terminal hydrolase isozyme L5 |
| 18. | Interleukin-6 |
| 19. | Myomesin-2 |
| 20. | Aprataxin and PNK-like factor |
| 21. | Apolipoprotein A1 |
| 22. | Regulator of nonsense transcripts 3B |
| 23. | Lumican |
| 24. | Interleukin-9 |
| 25. | C-C motif chemokine 13 |

NC vs. PDAC stage III/IV

| | |
|---|---|
| 1. | Plasma protease C1 inhibitor |
| 2. | Interleukin-4 |
| 3. | Complement C3 |
| 4. | Properdin |
| 5. | Complement C4 |
| 6. | Sialyl Lewis X |
| 7. | Calcineurin B homologous protein 1 |
| 8. | HADH2 protein |
| 9. | Protein-tyrosine kinase 6 |
| 10. | Apolipoprotein A1 |
| 11. | C-C motif chemokine 13 |
| 12. | Membrane-associated guanylate kinase, |
| | WW and PDZ domain-containing protein 1 |
| 13. | Lymphotoxin-alpha |
| 14. | Disks large homolog 1 |
| 15. | Protein kinase C zeta type |
| 16. | Interleukin-13 |
| 17. | Complement C5 |
| 18. | Serine/threonine-protein kinase MARK1 |
| 19. | GTP-binding protein GEM |
| 20. | IgM |
| 21. | Interleukin-8 |
| 22. | Vascular endothelial growth factor |
| 23. | Interleukin-6 |
| 24. | Interleukin-9 |

TABLE 5
scFv Specificities

| | | No. of |
|---|---|---|
| Antigen | Full name | scFvs |
| AKT3 | RAC-gamma serine/threonine-protein kinase | 2 |
| Angiomotin | Angiomotin | 2 |
| ANM5 | Protein arginine N-methyltransferase 5 | 2 |
| APLF | Aprataxin and PNK-like factor | 2 |
| APOA4 | Apolipoprotein A4 | 2 |
| APOA1 | Apolipoprotein A1 | 3 |
| ARHGC | Rho guanine nucleotide exchange factor 12 | 1 |
| ATP5B | ATP synthase subunit beta, mitochondrial | 2 |
| β-galactosidase | Beta-galactosidase | 1 |
| BIRC2 | Baculoviral IAP repeat-containing protein 2 | 2 |
| BTK | Tyrosine-protein kinase BTK | 3 |
| C1 esterase | Plasma protease C1 inhibitor | 3 |
| inhibitor | | |
| C1q | Complement C1q | 1 |
| C1s | Complement C1s | 1 |
| C3 | Complement C3 | 4 |
| C4 | Complement C4 | 3 |
| C5 | Complement C5 | 3 |
| CBPP22 | Calcineurin B homologous protein 1 | 2 |
| CD40 | CD40 protein | 4 |
| CD40L | CD40 ligand | 1 |
| CDK2 | Cyclin-dependent kinase 2 | 2 |
| CENTG1 | Arf-GAP with GTPase, ANK repeat and | 2 |
| | PH domain-containing protein 2 | |
| CHEK2 | Serine/threonine-protein kinase Chk2 | 2 |
| CHX10 | Visual system homeobox 2 | 2 |
| CSNK1E | Casein kinase I isoform epsilon | 2 |
| Cystatin C | Cystatin-C | 2 |
| DCNL1 | DCN1-like protein 1 | 2 |
| Digoxin | Digoxin | 1 |
| DLG1 | Disks large homolog 1 | 2 |
| DLG2 | Disks large homolog 2 | 2 |
| DLG4 | Disks large homolog 4 | 2 |
| DPOLM | DNA-directed DNA/RNA polymerase mu | 2 |
| DUSP7 | Dual specificity protein phosphatase 7 | 2 |
| DUSP9 | Dual specificity protein phosphatase 9 | 1 |
| EGFR | Epidermal growth factor receptor | 1 |
| Eotaxin | Eotaxin | 3 |
| Factor B | Complement factor B | 2 |
| FASN | FASN protein | 2 |
| FER | Tyrosine-protein kinase Fer | 2 |
| CA-19-9 | CA-19-9 (Full Ab) | 2 |
| (Full Ab) | | |
| GAK | GAK protein | 2 |
| GEM | GTP-binding protein GEM | 2 |
| GLP-1 | Glucagon-like peptide-1 | 1 |
| GLP-1R | Glucagon-like peptide 1 receptor | 1 |
| GM-CSF | Granulocyte-macrophage colony-stimulating | 4 |
| | factor | |
| GNAI3 | Guanine nucleotide-binding protein G(k) | 2 |
| | subunit alpha | |
| GORS2 | Golgi reassembly-stacking protein 2 | 2 |
| GPRK5 | G protein-coupled receptor kinase 5 | 1 |
| GRIP2 | Glutamate receptor-interacting protein 2 | 3 |
| HADH2 | HADH2 protein | 2 |
| Her2/ErbB2 | Receptor tyrosine-protein kinase erbB-2 | 2 |
| HLA-DR/DP | HLA-DR/DP | 1 |
| ICAM-1 | Intercellular adhesion molecule 1 | 1 |
| IFN-γ | Interferon gamma | 3 |
| IgM | IgM | 4 |
| IL-10 | Interleukin-10 | 3 |
| IL-11 | Interleukin-11 | 3 |
| IL-12 | Interleukin-12 | 4 |
| IL-13 | Interleukin-13 | 3 |
| IL-16 | Interleukin-16 | 3 |
| IL-18 | Interleukin-18 | 3 |
| IL-1-ra | Interleukin-1 receptor antagonist protein | 3 |
| IL-1α | Interleukin-1 alpha | 3 |
| IL-1β | Interleukin-1 beta | 3 |
| IL-2 | Interleukin-2 | 3 |
| IL-3 | Interleukin-3 | 3 |
| IL-4 | Interleukin-4 | 4 |
| IL-5 | Interleukin-5 | 3 |
| IL-6 | Interleukin-6 | 5 |
| IL-7 | Interleukin-7 | 2 |
| IL-8 | Interleukin-8 | 3 |
| IL-9 | Interleukin-9 | 3 |
| INADL | InaD-like protein | 2 |
| Integrin | Integrin alpha-10 | 1 |
| α-10 | | |
| Integrin | Integrin alpha-11 | 1 |
| α-11 | | |
| ITCH | E3 ubiquitin-protein ligase Itchy homolog | 2 |
| JAK3 | Tyrosine-protein kinase JAK3 | 1 |
| KCC2B | Calcium/calmodulin-dependent protein kinase | |
| | type II subunit beta | |
| KCC4 | Calcium/calmodulin-dependent protein kinase | 2 |
| | type IV | |
| Keratin 19 | Keratin, type I cytoskeletal 19 | 2 |
| KIAA0882 | TBC1 domain family member 9 | 3 |
| KKCC1 | Calcium/calmodulin-dependent protein kinase 1 | 2 |
| KRASB | GTPase KRas | 1 |
| KSYK | Tyrosine-protein kinase SYK | 2 |
| LDL | Apolipoprotein B-100 | 2 |
| Leptin | Leptin | 1 |
| Lewis x | Lewis x | 2 |
| Lewis y | Lewis y | 1 |
| LIN7A | Protein lin-7 homolog A | 2 |
| LUM | Lumican | 1 |
| MAGI1 | Membrane-associated guanylate kinase, | 2 |
| | WW and PDZ domain-containing protein 1 | |
| MAP2K2 | Dual specificity mitogen-activated | 2 |
| | protein kinase 2 | |
| MAP2K6 | Dual specificity mitogen-activated | 2 |
| | protein kinase 6 | |
| MAPK9 | Mitogen-activated protein kinase 9 | 3 |
| MARK1 | Serine/threonine-protein kinase MARK1 | 2 |
| MATK | Megakaryocyte-associated tyrosine- | 2 |
| | protein kinase | |
| MCP-1 | C-C motif chemokine 2 | 5 |
| MCP-3 | C-C motif chemokine 7 | 3 |
| MCP-4 | C-C motif chemokine 13 | 3 |
| MD2L1 | Mitotic spindle assembly checkpoint | 2 |
| | protein MAD2A | |
| MK01 | Mitogen-activated protein kinase 1 | 2 |
| MK08 | Mitogen-activated protein kinase 8 | 3 |
| Mucin-1 | Mucin-1 | 4 |
| MYOM2 | Myomesin-2 | 2 |
| NDC80 | Kinetochore protein NDC80 homolog | 2 |
| NOS1 | Nitric oxide synthase, brain | 2 |
| OSBPL3 | Oxysterol-binding protein-related | 2 |
| | protein 3 | |
| OSTP | Osteopontin | 2 |
| OTU6B | OTU domain-containing protein 6B | 2 |
| OTUB1 | Ubiquitin thioesterase OTUB1 | 2 |
| OTUB2 | Ubiquitin thioesterase OTUB2 | 2 |
| P85A | Phosphatidylinositol 3-kinase | 2 |
| | regulatory subunit alpha | |
| PAK4 | Serine/threonine-protein kinase PAK 4 | 2 |
| PAK5 | Serine/threonine-protein kinase PAK 7 | 2 |
| PARP1 | Poly [ADP-ribose] polymerase 1 | 1 |
| PARP6B | Partitioning defective 6 homolog beta | 2 |
| PGAM5 | Serine/threonine-protein phosphatase | 2 |
| | PGAM5, mitochondrial | |
| PRD14 | PR domain zinc finger protein 14 | 3 |
| PRDM8 | PR domain zinc finger protein 8 | 2 |
| PRKCZ | Protein kinase C zeta type | 2 |
| PRKG2 | cGMP-dependent protein kinase 2 | 2 |
| Procathepsin W | Cathepsin W | 1 |
| Properdin | Properdin | 1 |
| PSA | Prostate-specific antigen | 1 |
| PTK6 | Protein-tyrosine kinase 6 | 1 |
| PTN13 | Tyrosine-protein phosphatase non- | 2 |
| | receptor type 13 | |
| PTPN1 | Tyrosine-protein phosphatase non- | 2 |
| | receptor type 1 | |
| PTPRD | Receptor-type tyrosine-protein | 2 |
| | phosphatase delta | |
| PTPRJ | Receptor-type tyrosine-protein | 3 |
| | phosphatase eta | |
| PTPRK | Receptor-type tyrosine-protein | 3 |
| | phosphatase kappa | |
| PTPRN2 | Receptor-type tyrosine-protein | 2 |
| | phosphatase N2 | |
| PTPRO | Receptor-type tyrosine-protein | 2 |
| | phosphatase O | |
| PTPRT | Receptor-type tyrosine-protein | 2 |
| | phosphatase T | |
| RANTES | C-C motif chemokine 5 | 3 |
| RPS6KA2 | Ribosomal protein S6 kinase alpha-2 | 2 |
| SHC1 | SHC-transforming protein 1 | 2 |
| Sialyl | Sialyl Lewis x | 1 |
| Lewis x | | |
| SNTA1 | Alpha-1-syntrophin | 2 |
| Sox11a | Transcription factor SOX-11 | 1 |
| SPDLY | Protein Spindly | 2 |
| STAP1 | Signal-transducing adaptor protein 1 | 2 |
| STAP2 | Signal-transducing adaptor protein 2 | 2 |
| STAT1 | Signal transducer and activator of | 2 |
| | transcription 1-alpha/beta | |
| TENS4 | Tensin-4 | 1 |
| TGF-β1 | Transforming growth factor beta-1 | 3 |
| TNFRSF14 | Tumor necrosis factor receptor | 2 |
| | superfamily member 14 | |
| TNFRSF3 | Tumor necrosis factor receptor | 2 |
| | superfamily member 3 | |
| TNF-α | Tumor necrosis factor | 3 |
| TNF-β | Lymphotoxin-alpha | 4 |
| TOPB1 | DNA topoisomerase 2-binding protein 1 | 2 |
| UBC9 | SUMO-conjugating enzyme UBC9 | 2 |
| UBE2C | Ubiquitin-conjugating enzyme E2 C | 2 |
| UBP7 | Ubiquitin carboxyl-terminal hydrolase 7 | 2 |
| UCHL5 | Ubiquitin carboxyl-terminal hydrolase | 1 |
| | isozyme L5 | |
| UPF3B | Regulator of nonsense transcripts 3B | 2 |
| VEGF | Vascular endothelial growth factor | 4 |

TABLE 6
SVM script

```
(A) LOO (Leave One Out)
rawfile <- read.delim(filnamn)
samplenames <- as.character(rawfile[,1])
groups <- rawfile[,2]
data <- t(rawfile[,-c(1:2)])
ProteinNames <- read.delim(filnamn,header=FALSE)
ProteinNames <- as.character(as.matrix(ProteinNames)[1,])
ProteinNames <- ProteinNames[-(1:2)]
rownames(data) <- ProteinNames
colnames(data) <- samplenames
PairWiseGroups<- as.matrix(read.delim(“Test.txt”,header=FALSE))
wilcoxtest <- function(prot,subset1,subset2){
res <- wilcox.test(prot[subset1],prot[subset2])
res$p.value
}
foldchange <- function(prot,subset1,subset2){
2\hat{ }(mean(prot[subset1]) − mean(prot[subset2]))
}
BenjaminiHochberg <- function(pvalues){
  # This function takes a vector of p-values as input and outputs
  # their q-values. No reordering of the values is performed
  NAindices <- is.na(pvalues)
  Aindices <- !NAindices
  Apvalues <- pvalues[Aindices]
  N <- length(Apvalues)
  orderedindices <- order(Apvalues)
  OrdValues <- Apvalues[orderedindices]
  CorrectedValues <- OrdValues * N /(1:N)
  MinValues <- CorrectedValues
  for (i in 1:N){MinValues[i] <- min(CorrectedValues[i:N])}
  Aqvalues <- numeric(N)
  Aqvalues[orderedindices] <- MinValues
  Qvalues <- pvalues
  Qvalues[Aindices] <- Aqvalues
  return(Qvalues)
}
library(MASS)
library(gplots)
redgreen <- function(n)
  {
  c(
    hsv(h=0/6, v=c( rep( seq(1,0.3,length=5) , c(13,10,8,6,4) ) , 0 ) ) ,
    hsv(h=2/6, v=c( 0, rep( seq(0.3,1,length=5) , c(3,5,7,9,11) ) ) )
  )
  }
pal <- rev(redgreen(100));
library(e1071)
source(“NaiveBayesian”)
svmLOOvalues <- function(data , fac){
n1 <- sum(fac==levels(fac)[1])
n2 <- sum(fac==levels(fac)[2])
nsamples <- n1+n2
ngenes <- nrow(data)
SampleInformation <- paste(levels(fac)[1],“ ”,n1,“, ”,levels(fac)[2],“ ”, n2,sep=“”)
res <- numeric(nsamples)
sign <- numeric(nsamples)
for (i in 1:nsamples){
  svmtrain <- svm(t(data[,−i]) , fac[−i] , kernel=“linear” )
  pred <- predict(svmtrain , t(data[,i]) , decision.values=TRUE)
  res[i] <- as.numeric(attributes(pred)$decision.values)
  facnames <- colnames(attributes(pred)$decision.values)[1]
  if (facnames == paste(levels(fac)[1],“/”,levels(fac)[2],sep=“”)){sign[i] <- 1}
  if (facnames == paste(levels(fac)[2],“/”,levels(fac)[1],sep=“”)){sign[i] <- −1}
}
if (length(unique(sign)) >1){print(“error”)}
res <- sign * res
names <- colnames(data , do.NULL=FALSE)
orden <- order(res , decreasing=TRUE)
Samples <- data.frame(names[orden],res[orden],fac[orden])
ROCdata <- myROC(res,fac)
SenSpe <- SensitivitySpecificity(res,fac)
return(list(SampleInformation=SampleInformation,ROCarea=ROCdata[1],p.value=ROCdata[2],SenSpe <-
SenSpe,samples=Samples))
}
Analysera<- function(group1 ,group2){
  outputfiletxt <- paste(group1,“ versus ”,group2,“.txt” ,sep=“”)
  outputfilepdf <- paste(group1,“ versus ”,group2,“.pdf” ,sep=“”)
  subset1 <- is.element(groups , strsplit(group1,“,”)[[1]])
  subset2 <- is.element(groups , strsplit(group2,“,”)[[1]])
  wilcoxpvalues <- apply(data , 1 , wilcoxtest , subset1 , subset2)
  foldchange <- apply(data , 1 , foldchange , subset1 , subset2)
  QvaluesAll <- BenjaminiHochberg(wilcoxpvalues)
  HugeTable <- cbind(ProteinNames,foldchange,wilcoxpvalues,QvaluesAll)
  write.table(HugeTable, file=outputfiletxt , quote=FALSE, sep=“\t”,row.names=FALSE)
  color <- rep(‘black’, length(subset1))
  color[subset1] <- ‘red’
  color[subset2] <- ‘blue’
  pdf(outputfilepdf)
  Sam <- sammon(dist(t(data[,subset1|subset2])) , k=2)
  plot(Sam$points , type=“n” , xlab = NA , ylab=NA, main=“All proteins” ,asp=1)
  text(Sam$point , labels = colnames(data[,subset1|subset2]), col=color[subset1|subset2])
  heatmap.2(data[,subset1|subset2] , labRow = row.names(data), trace=“none” , labCol =“” , ColSideColors=
color[subset1|subset2],col=pal , na.color= “grey”, key=FALSE , symkey =FALSE , tracecol = “black” , main =“” , dendrogram= ‘both’
, scale =“row” ,cexRow=0.2)
  svmfac <- factor(rep(‘rest’,ncol(data)),levels=c(group1,group2,‘rest’))
  svmfac[subset1] <- group1
  svmfac[subset2] <- group2
  svmResAll <- svmLOOvalues(data[,subset1|subset2] , factor(as.character(svmfac[subset1|subset2]),levels=c(group1,group2)))
  ROCplot(svmResAll , sensspecnumber=4)
  write(“” , file=outputfiletxt , append=TRUE)
  write(“All proteins” , file=outputfiletxt , append=TRUE)
  write(“” , file=outputfiletxt , append=TRUE)
  for (i in 1:5){write.table(svmResAll[i]], file=outputfiletxt , append=TRUE, sep=“\t” , quote=FALSE)
          write( “” , file=outputfiletxt , append=TRUE)
  }
  dev.off( )
}
(B) BE (Backward Elimination)
getWorstAb <- function(errors, abNames, sortDe)
{
  return(abNames[order(errors, decreasing = sortDe)[1]])
}
testModels <- function(models, elimData, averages, svmfac, cvSplitTrn, cvSplitVal, nKfold, nRep, sortDe)
{
  nsamples <- ncol(elimData)
  d0 <- as.numeric(svmfac)−1
  E <- numeric(nsamples)
  analytes <- nrow(elimData)
  errors <- numeric(nrow(elimData))
  nSplits <- length(cvSplitTrn)
  for(k in 1:analytes){
    backup <- elimData[k,]
    elimData[k,] <- averages[k]
    nM <- 1
    aveE <- 0
    aveAuc <- 0
    for (nr in 1:nRep){
      y <- numeric(0)
      d <- numeric(0)
      for (nk in 1:nKfold){
        idx <-cvSplitVal[[nM]]
        pred <- predict(models[[nM]] , t(elimData[,idx]), decision.values=TRUE)
        d <- c(d, d0[idx])
        y <- c(y, as.numeric(attributes(pred)$decision.values))
        nM <- nM + 1
      }
      if (length(d) != nsamples || length(y) != nsamples) {
        stop(“Error: Lengths of prediction and target vector are wrong!”)
      }
      y = 1−(1/(1 + exp(−y)))
      for (i in 1:nsamples){
        E[i] <- −(d[i]*log(y[i])+(1−d[i])*log(1−y[i]))
      }
      aveE <- aveE + sum(E)
      if (sortDe) {
        auroc <- roc(d,y)
        aveAuc <- aveAuc + auroc$auc
      }
    }
    if (sortDe) {
      errors[k] <- aveAuc / nRep
    } else {
      errors[k] <- aveE / nRep
    }
    elimData[k,] <- backup
  }
  return( errors )
}
getNewElimData <- function(errors, elimData, sortDe){
  tasBort <- order(errors,decreasing = sortDe)[1]
  return(elimData[−tasBort,])
}
getSmallestError <- function(errors, sortDe){
  if (sortDe) {
    return(max(errors))
  } else {
    return(min(errors))
  }
}
getNewAverages <- function(errors, averages, sortDe){
  tasBort <- order(errors, decreasing = sortDe)[1]
  return(averages[−tasBort])
}
backElim <- function(filename, resfile, plotfile, group1, group2, nKfold, nRep, nKOut, nRepOut, sortDe){
  rawfile <- read.delim(filename)
  groups <- rawfile[,2]
  samplenames <- as.character(rawfile[,1])
  data <- t(rawfile[,−c(1,2)])
  ProteinNames <- read.delim(filename,header=FALSE)
  ProteinNames <- as.character(as.matrix(ProteinNames)[1,])
  ProteinNames <- ProteinNames[−(1:2)]
  antal <- length(ProteinNames)
  print(ProteinNames)
  rownames(data) <- ProteinNames
  colnames(data) <- samplenames
  subset1 <- is.element(groups , strsplit(group1,“,”)[[1]])
  subset2 <- is.element(groups , strsplit(group2,“,”)[[1]])
  svmfac <- factor(rep(‘rest’,ncol(data)),levels=c(group1,group2,‘rest’))
  svmfac[subset1] <- group1
  svmfac[subset2] <- group2
  svmfac <- svmfac[subset1|subset2]
  smallestErrorPerLength <- rep(NA,antal)
  averages <- apply(data, 1, mean)
  abOrder <- rep(NA,antal)
  elimData <- data[,subset1|subset2]
  nsamples <- ncol(elimData)
  subset1 <- svmfac==group1
  subset2 <- svmfac==group2
  print(paste(nsamples, “samples”),quote=F)
  print(paste(“ ”,sum(subset1), “in”, group1),quote=F)
  print(paste(“ ”,sum(subset2), “in”, group2),quote=F)
  models <- numeric(nsamples)
  borttagna <- 0
  wrst <- 0
  proc <- 0
  m <- 0
  for(i in 1:(antal−1)){
    m <- m+(antal−i)*sqrt(antal−i)
  }
  control <- as.numeric(svmfac)
  checkGr1<- svmfac[subset1]
  if(sum(control[checkGr1])!= sum (control[subset1])){
    stop(“ERROR: Change the order of group1 and group2 in the data file!!!”)
  }
  checkGr2<- svmfac[subset2]
  if(2*(sum(control[checkGr2]))!= sum (control[subset2])) {
    stop(“ERROR: Change the order of group1 and group2 in the data file!!!”)
  }
  cvSplitOuter <- createMultiFolds(svmfac, k=nKOut, times=nRepOut)
  abOrderRank <- vector(‘numeric’, antal)
  names(abOrderRank) <- ProteinNames
  avePerf <- vector(‘numeric’, antal)
  for(no in 1:(nKOut * nRepOut)){
    idxW <- cvSplitOuter[[no]]
    elimDataW <- elimData[,idxW]
    averagesW <- apply(elimDataW, 1, mean)
    svmfacW <- svmfac[idxW]
    nsamplesW <- ncol(elimDataW)
    print(nKfold)
    print(nRep)
    cvSplitTrn <- createMultiFolds(svmfacW, k=nKfold, times=nRep)
    nSplits <- length(cvSplitTrn)
    if (nSplits != nKfold * nRep) {
      stop(“Error: Failure in cvSplits”)
    }
    cvSplitVal <- vector(“list“, length = nSplits)
    idx0 <- c(1:nsamplesW)
    for (i in 1:nSplits) {
      idx <- cvSplitTrn[[i]]
      cvSplitVal[[i]] = idx0[−idx]
    }
    abOrder <- rep(NA,antal)
    smallestErrorPerLength <- rep(NA,antal)
    for(j in 1:(antal−1)){
      start.time <- Sys.time( )
      models <- vector(‘list’, 0)
      for (nM in 1:nSplits){
        idx <- cvSplitTrn[[nM]]
        models[nM] <- list(svm(t(elimDataW[,idx]), svmfacW[idx], kernel=“linear”))
      }
      errors <- testModels(models, elimDataW, averagesW, symfacW,
                cvSplitTrn, cvSplitVal, nKfold, nRep, sortDe)
      wrst<-getWorstAb(errors, row.names(elimDataW), sortDe)
      abOrder[j] <- wrst
      smallestErrorPerLength[j] <- getSmallestError(errors, sortDe)
      averagesW <- getNewAverages(errors, averagesW, sortDe)
      elimDataW <- getNewElimData(errors, elimDataW, sortDe)
      borttagna <- borttagna + 1
      proc <- proc + (antal−j)*sqrt(antal−j)
      end.time <- Sys.time( )
      time.taken <- end.time - start.time
      ans <- sprintf(“(%d): %-30s eliminated, last perf: %.2f, time: %.2f”,
              j, wrst, smallestErrorPerLength[j], time.taken)
      print(ans)
    }
    abOrder[length(abOrder)] <- setdiff(ProteinNames, abOrder)
    for (ii in 1:antal) {
      abOrderRank[abOrder[ii]] <- abOrderRank[abOrder[ii]] + log(ii)
      avePerf[ii] <- avePerf[ii] + smallestErrorPerLength[ii]
    }
  }
  avePerf <- avePerf / (nKOut*nRepOut)
  abOrderRank <- abOrderRank / (nKOut*nRepOut)
  abOrderRank <- abOrderRank[order(abOrderRank)]
  abOrderRank <- exp(abOrderRank)
  write.table(
    cbind(avePerf, abOrderRank, names(abOrderRank)),
    file=resfile, sep=“\t”, quote=F, row.names=F)
  pdf(plotfile)
  plot(avePerf, type =“b”, ylab = “K-L Error”, xlab = “Eliminations”)
}
library(e1071, quietly = TRUE)
library(caret, quietly = TRUE)
library(pROC, quietly = TRUE)
doArgs <- FALSE
useROC <- FALSE
sortDe <- FALSE
if (useROC) {
  sortDe <- TRUE
}
if( doArgs ) {
  args <- commandArgs(trailingOnly = TRUE)
  dataFile <- args[1]
  resultFile <- args[2]
  plotFile <- args[3]
  nKfold <- as.numeric(args[4])
  nRep <- as.numeric(args[5])
  nKOut <- as.numeric(args[6])
  nRepOut <- as.numeric(args[7])
  backElim(dataFile, resultFile, plotFile, “1”, “0”, nKfold, nRep, nKOut, nRepOut, sortDe)
} else {
  dataFile <- ‘Herlev Raw NC & PDAC_RF.txt’
  resultFile <- ‘rnd_rankRes.txt’
  plotFile <- ‘rnd_rankPlot.pdf’
  nKfold <- 10
  nRep <- 5
  nKOut <- 5
  nRepOut <- 1
  backElim(dataFile, resultFile, plotFile, “Normal”, “PDAC”, nKfold, nRep, nKOut, nRepOut, sortDe)
}
```

TABLE 7
Amino acid sequences of the scFv antibodies used in the Examples

| | |
|---|---|
| IL-1a | EVQLLESGGGLVQPGGSLRLSCAASGFTFSSYAMHWVRQAPGKGLEWVSGVSWNGSRTHYADSVKGRFT |
| (1) | ISRDNSKNTLYLQMNSLRAEDTAVYYCARSSGYYSWAFDIWGQGTLVTVSSGGGGSGGGGSGGGGSQSV |
| | LTQPPSASGTPGQRVTISCSGSSSNIGRNTVNWYQQLPGTAPKLLIYGNSNRPSXVPDRFSGSKSGTSA |
| | SLAISGLRSEDEADYYCAAWDDSLNGWAFGGXTKLTVLGEQKLISXXXLSGSAA [SEQ ID NO: 1] |
| IL-1a | EVQLLESGGGLVQPGGSLRLSCAASGFTFSSYSMNWVRQAPGKGLEWVALISYDGSQKYYADSMKGRFT |
| (2) | ISRDNSKNTLYLQMNSLRAEDTAVYYCAKGHTSGTKAYYFDSWGQGTLVTVSSGGGGSGGGGSGGGGSQ |
| | SVLTQPPSASGTPGQRVTISCTGTSSNIGAGYSVHWYQQLPGTAPKLLIYGNSNRPSGVPDRFSGSKSG |
| | TSASLAISGLRSEDXADYYCQSYDSSLSGWVFGGXTKLTVLGEQKLISEEDLSGSAA |
| | [SEQ ID NO: 2] |
| IL-2 | EVQLLESGGGLVQPGGSLRLSCAASGFTFGDYAMSWVRQAPGKGLEWVSSISSRGSYIYFADSVKGRFT |
| (1) | ISRDNSKNTLYLQMNSLRAEDTAVYYCAKKKTGYYGLDAWGQGTLVTVSSGGGGSGGGGSGGGGSQSVL |
| | TQPPSASGTPGQRVTISCTGSSSNIGAGYDVHWYQQLPGTAPKLLIYGNSNRPSGVPDRFSGSKSGTSA |
| | SLAISGLRSEDEADYYCSSYAGSNNLVFGGXTKLTXLGEQKLISXXDLSGSAA [SEQ ID NO: 3] |
| IL-2 | EVXXLESGGGLVQPGGSLRLSCAASGFTFGDYAMSWVRQAPGKGLEWVSSISSRGSYIYFADSVKGRFT |
| (2) | ISRDNSKNTLYLQMNSLRAEDTAVYYCAKKKTGYYGLDAWGQGTLVTVSSGGGGSGGGGSGGGGSQSVL |
| | TQPPSASGTPGQRVTISCTGSSSNIGAGYDVHWYQQLPGTAPKLLIYGNSNRPSGVPDRFSGSKSGTSA |
| | SLAISGLRSEDEADYYCSSYAGSNNLVFGGXXKLTVLGEQKLISEXXLSGSAA [SEQ ID NO: 4] |
| IL-2 | EVQLLESGGGLVQPGGSLRLSCAASGFTFGDYAMSWVRQAPGKGLEWVSSISSRGSYIYFADSVKGRFT |
| (3) | ISRDNSKNTLYLQMNSLRAEDTAVYYCAKKKTGYYGLDAWGQGTLVTVSSGGGGSGGGGSGGGGSQSVL |
| | TQPPSASGTPGQRVTISCTGSSSXIGAGYDVHWYQQLPGTAPKLLIYGNSNRP [SEQ ID NO: 5] |
| IL-3 | EVQLLESGGGLVQPGGSLRLSCAASGFTFGRYTMHWVRQAPGKGLEWVSSISSSSSYIYYADSVKGRFT |
| (1) | ISRDNSKNTLYLQMNSLRAEDTAVYYCARHFFESSGGYFDYWGQGTLVTVSSGGGGSGGGGSGGGGSQS |
| | VLTQPPSASGTPGQRVTISCSGSSSNIGSNTVNWYQQLPGTAPKLLIYRNNQRPSGVPDRFSGSKSGTS |
| | ASLAISGLRSEDXADYYCAAWDDSLNGWVFGGXXKLTVLGEQKLISXXXLSGXAA |
| | [SEQ ID NO: 6] |
| IL-3 | EVQLLESGGGLVQPGGSLRLSCAASGFTFSSYAMSWVRQAPGKGLEWVSAISGSGGSTYYADSVKGRFT |
| (2) | ISRDNSKNTLYLQMNSLRAEDTAVYYCARGGARYDYWGQGTLVTVSSGGGGSGGGGSGGGGSQSVLTQP |
| | PSASGTPGQRVTISCSGSSSNIGSNTVNWYQQLPGTAPKLLIYDNNKRPSGVPDRFSGSKSGTSASLAI |
| | SGLRSEDEADYYCQSYDNILRGVVFGGGTKLTVLXEQKLISEXDLSGSAA [SEQ ID NO: 7] |
| IL-3 | EVXXXESGGGLVQPGGSLRLSCAASGFTFSSYAMSWVRQAPGKGLEWVSAISGRGEYTYYAGSVKGRFT |
| (3) | ISRDNSKNTLYLQMNSLRAEDTAVYYCATGATRFGYWGQGTLVTVSSGGGGSGGGGSGGGGSQSVLTQP |
| | PSASGTPGQRVTISCTGSSSNIGAGYGVQWYQQLPGTAPKLLIYRNNQRPSGVPDRFSGSKSGTSXSLA |
| | ISGLRSEDEADYYCQSYDSSLSYSVFGGXTKLTVLGEQKLISXXDLSGSAA [SEQ ID NO: 8] |
| IL-4 | EVQLLESGGGLVQPGGSLRLSCAASGFTFSNAWMSWVRQAPGKGLEWVSSLHGGGDTFYTDSVKGRFTI |
| (1) | SRDNSKNTLYLQMNSLRAEDTAVYYCASLYGSGSYYYYYYGMDVWGQGTLVTVSSGGGGSGGGGSGGGG |
| | SQSVLTQPPSASGTPGQRVTISCSGNNSNTGNNAVNWYQQLPGTAPKLLIYDNNKRPSGVPDRFSGSKS |
| | GTSASLAISGLRSEDEADYYCCSYAGSYIWVFGGXTKLTVLGEQKLISXEXLSGSAA |
| | [SEQ ID NO: 9] |
| IL-4 | EVQLLESGGGLVQPGGSLRLSCAASGFTFSDYGMHWVRQAPGKGLEWVSGISWNGGKTHYVDSVKGQFT |
| (2) | ISRDNSKNTLYLQMNSLRAEDTAVYYCARDRGYCSNGVCYTILDYWGQGTLVTVSSGGGGSGGGGSGGG |
| | GSQSVLTQPPSASGTPGQRVTISCSGSSSNIGSNTINWYQQLPGTAPKLLIYGNSNRPSGVPDRFSGSK |
| | SGTSASLAISGLRSEDEADYYCQSYDSSLSGWVFGGXTKLXVLXEQKLISXXDLSGSAA |
| | [SEQ ID NO: 10] |
| IL-5 | EVQLLESGGGLVQPGGSLRLSCAASGFTFSSYAMSWVRQAPGKGLEWVSSISSRSNYIYYSDSVKGRFT |
| (1) | ISRDNSKNTLYLQMNSLRAEDTAVYYCARNFRFFDKWGQGTLVTVSSGGGGSGGGGSGGGGSQSVLTQP |
| | PSASGTPGQRVTISCSGGSSXIGANPVSWYQQLPGTAPKLLIYGNSNRP [SEQ ID NO: 11] |
| IL-5 | EVQLLESGGGLVQPGGSLRLSCAASGFTFSSYAMSWVRQAPGKGLEWVSSISSRSNYIYYSDSVKGRFT |
| (2) | ISRDNSKNTLYLQMNSLRAEDTAVYYCARNFRFFDKWGQGTLVTVSSGGGGSGGGGSGGGGSQSVLTQP |
| | PSASGTPGQRVTISCSGGSSNIGANPVSWYQQLPGTAPKLLIYGNSNRPSGVPDRFSGSKSGTSASLAI |
| | SGLRSEDEADYYCQSYDSSLSGSVFGGXTKLTVLXEQKLISEXXLSGSAA [SEQ ID NO: 12] |
| 1L-5 | EVQLLESGGGLVQPGGSLRLSCAASGFTFSSYAMSWVRQAPGKGLEWVSSISSRSNYIYYSDSVKGRFT |
| (3) | ISRDNSKNTLYLQMNSLRAEDTAVYYCARNFRFFDKWGQGTLVTVSSGGGGSGGGGSGGGGSQSVLTQP |
| | PSASGTPGQRVTISCSGGSSNIGANPVSWYQQLPGTAPKLLIYGNSNRPSGVPDRFSGSKSGTSASLAI |
| | SGLRSEDEADYYCQSYDSSLSGSVFGGXTKLTVLGEQKLISXEDLSGSAA [SEQ ID NO: 13] |
| IL-6 | EVQLLESGGGLVQPGGSLRLSCAASGFTFSSYGMHWVRQAPGKGLEWVSGINWNGGSTGYADSVKGRFT |
| (1) | ISRDNSKNTLYLQMNSLRAEDTAVYYCARNRGSSLYYGMDVWGQGTLVTVSSGGGGSGGGGSGGGGSQS |
| | VLTQPPSASGTPGQRVTISCAGSSSNIGSKSVHWYQQLPGTAPKLLIYRNNRRPSGVPDRFSGSXSGTS |
| | XSLAIXGLRSXDXADYYCXXWDDRVNXXXFGGXTXLTVLXXQKLISXXXLSGSXXXPSSSXXLIXXGXX |
| | XXLX-XXLXFTGRXFXTX-LXXX [SEQ ID NO: 14] |
| IL-6 | EVQLLESGGGLVQPGGSLRLSCAASGFTFSNYGMHWVRQAPGKGLEWVSSITSSGDGTYFADSVKGRFT |
| (2) | ISRDNSKNTLYLQMNSLRAEDTAVYYCARAGGIAAAYAFDIWGQGTLVTVSSGGGGSGGGGSGGGGSQS |
| | VLTQPPSASGTPGQRVTISCSGSSSNVGSNYVYWYQQLPGTAPKLLIYDNNKRPSGVPDRFSGSKSGTS |
| | ASLAISGLRSEDEADYYCQSYDSSRWVFGGXTKLTVLGEQXLISEEXLSGSAA [SEQ ID NO: 15] |
| IL-7 | EVQLLESGGGLVQPGGSLRLSCAASGFTFSSYGMHWVRQAPGKGLEWVSGITWNSGSIGYVDSVKGRFT |
| (1) | ISRDNSKNTLYLQMNSLRAEDTAVYYCARGPSVAARRIGRHWYNWFDPWGQGTLVTVSSGGGGSGGGGS |
| | GGGGSQSVLTQPPSASGTPGQRVTISCSGSSSNIGSNSVYWYQQLPGTAPKLLIYDNNKRPSGVPDRFS |
| | GSKSGTSASLAISGLRSEXXADYYCQSYDSSLSGSVFGGXXKLXVLGEQKLISEXXLSGSAA |
| | [SEQ ID NO: 16] |
| IL-7 | EVQLLESGGGLVQPGGSLRLSCAASGFTFSDYNIHWVRQPPGKGLEWVSGVSWNGSRTHYADSVKGQFT |
| (2) | ISRDNSKNTLYLQMNSLRAEDTAVYYCARDPAMVRGVVLPNYYGLDVWGQGTLVTVSSGGGGSGGGGSG |
| | GGGSQSVLTQPPSASGTPGQRVTISCTGSSSNIGAGYDVHWYQQLPGTAPKLLIYGHSNRPSGVPDRFS |
| | GSKSGTSASLAISGLRSEXXADYYCQSYDSSLSYPVFGGXTKLTVLGEQ [SEQ ID NO: 17] |
| IL-8 | EVQLLESGGGLVQPGGSLRLSCAASGFTFDDYGMSWVRQAPGKGLEWVSLISWDGGSTYYADSVKGRFT |
| (1) | ISRDNSKNTLYLQMNSLRAEDTAVYYCARDDLYGMDVWGQGTLVTVSSGGGGSGGGGSGGGGSQSVLTQ |
| | PPSASGTPGQRVTISCTGSSSNIGAGYDVHWYQQLPGTAPKLLIYDNNKRPSXVPDRFSGSKSGTSASL |
| | AISGLRSEDEADYYCAAWDDSLSGWVFGGXTKLTVLXEQKLISEXXLSGSAA [SEQ ID NO: 18] |
| IL-8 | EVQLLESGGGLVQPGGSLRLSCAASGFTFSSYEMNWVRQAPGKGLEWVSSISSSSSYIFYADSMKGRFT |
| (2) | ISRDNSKNTLYLQMNSLRAEDTAVYYCARNESVDPLGGQYFQHWGQGTLVTVSSGGGGSGGGGSGGGGS |
| | QSVLTQPPSASGTPGQRVTISCTGSSSNIGAGYDVHWYQQLPGTAPKLLIYDNNKRPSGVPDRFSGSKS |
| | GTSASLAISGLRSEDEADYYCSAWDDNLDGPVFGGXTKLTVLXEQKLISXXXLSGSAA |
| | [SEQ ID NO: 19] |
| IL-9 | EVQLLESGGGLVQPGGSLRLSCAASGFTFSSYAMSWVRQAPGKGLEWVSSISSSSSYIYYADSVKGRFT |
| (1) | ISRDNSKNTLYLQMNSLRAEDTAVYYCTTFGHWGQGTLVTVSSGGGGSGGGGSGGGGSQSVLTQPPSAS |
| | GTPGQRVTISCSGSGSNIGDNSVNWYQQLPGTAPKLLIYGNNNRPSGVPDRFSGSKSGTSASLAISGLR |
| | SEDEADYYCSSYTSSSVVFGGXTKLTVLXEQKLISEXDLSGSAA [SEQ ID NO: 20] |
| IL-9 | EVQLLESGGGLVQPGGSLRLSCAASGFTFSSYGMHWVRQAPGKGLEWVAVISYDGSNKYYADSVKGRFT |
| (2) | ISRDNSKNTLYLQMNSLRAEDTAVYYCAKSPGGSPYYFDYWGQGTLVTVSSGGGGSGGGGSGGGGSQSV |
| | LTQPPSASGTPGQRVTISCSGSVSNIGSNVVSWYQQLPGTAPKLLIYDNNKRPS |
| | [SEQ ID NO: 21] |
| IL-9 | EVQLLESGGGLVQPGGSLRLSCAASGFTFSSYGMHWVRQAPGKGLEWVAVISYDGSNKYYADSVKGRFT |
| (3) | ISRDNSKNTLYLQMNSLRAEDTAVYYCAKSPGGSPYYFDYWGQGTLVTVSSGGGGSGGGGSGGGGSQSV |
| | LTQPPSASGTPGQRVTISCSGSVSNIGSNVVSWYQQLPGTAPKLLIYDNNKRPSGVPDRFSGSKSGTSA |
| | SLAISGLRSEDEADYYCQSYDSSLGGWVFGGXTKLTVLGEQKLISEXDLSGSAA |
| | [SEQ ID NO: 22] |
| IL-10 | EVQLLESGGGLVQPGGSLRLSCAASGFTFRSYVMSWVRQAPGKGLEWVSAISGSGGSTYYADSVKGRFT |
| (1) | ISRDNSKNTLYLQMNSLRAEDTAVYYCARGKGRWAFDIWGQGTLVTVSSGGGGSGGGGSGGGGSQSVLT |
| | QPPSASGTPGQRVTISCTGSSSNVGAGYDVHWYQQLPGTAPKLLIYRNNQRPSGVPDRFSGSKSGTSAS |
| | LAISGLRSXDXADYYCAAWDDSLSAHVVFGGXTKLTVLGEQKLISXXDLSGSAA |
| | [SEQ ID NO: 23] |
| IL-10 | EVQLLESGGGLVQPGGSLRLSCAASGFTFRSYVMSWVRQAPGKGLEWVSAISGSGGSTYYADSVKGRFT |
| (2) | ISRDNSKNTLYLQMNSLRAEDTAVYYCARGKGRWAFDIWGQGTLVTVSSGGGGSGGGGSGGGGSQSVLT |
| | QPPSASGTPGQRVTISCTGSSSNVGAGYDVHWYQQLPGTAPKLLIYRNNQRPSGVPDRFSGSKSGTSAS |
| | LAISGLRSEDEADYYCAAWDDSLSAHVVFGGXTKLTVLGEQKLISEXDLSGSAA |
| | [SEQ ID NO: 24] |
| IL-10 | EVQLLESGGGLVQPGGSLRLSCAASGFTFSSYAMSWVRQAPGKGLEWVSAISGSGGSTYYADSVKGRFT |
| (3) | ISRDNSKNTLYLQMNSLRAEDTAVYYCARGKGRWAFDIWGQGTLVTVSSGGGGSGGGGSGGGGSQSVLT |
| | QPPSASGTPGQRVTISCTGSSSNIGAGYGVHWYQQLPGTAPKLLIYGNSNRPSGVPDRFSGSKSGTSAS |
| | LAISGLRSEDXADYYCAAWDDSLSGLVFGGXTKLTVLXEQKLISEXXLSGSAA [SEQ ID NO: 25] |
| IL-11 | EVQLLESGGGLVQPGGSLRLSCAASGFTFSNFGMHWVRQAPGKGLEWVAFIRYDGSNKYYADSVKGRFT |
| (1) | ISRDNSKNTLYLQMNSLRAEDTAVYYCARHYYYSETSGHPGGFDPWGQGTLVTVSSGGGGSGGGGSGGG |
| | GSQSVLTQPPSASGTPGQRVTISCSGSSSNIGSYPVNWYQQLPGTAPKLLIYGNSNRPSGVPDRFSGSK |
| | SGTSASLAISGLRSEDEADYYCQXWGTGVFGGXTKLTVLGEQKLISXEXLSGSAA |
| | [SEQ ID NO: 26] |
| IL-11 | EVQLLESGGGLVQPGGSLRLSCAASGFTFSSYGMHWVRQAPGKGLEWVAVISYDGSNKYYADSVKGRFT |
| (2) | ISRDNSKNTLYLQMNSLRAEDTAVYYCARHYYDVSYRGQQDAFDIWGQGTLVTVSSGGGGSGGGGSGGG |
| | GSQSVLTQPPSASGTPGQRVTISCTGSSSNLGSPYDVHWYQQLPGTAPKLLIYRNDQRASGVPDRFSGS |
| | XSGTSASLAISGLRSEDEADYYCAAWDDSLNAWVFGGXTKLTVLGEQKLISEXXLSGSAA |
| | [SEQ ID NO: 27] |
| IL-11 | EVQLLESGGGLVQPGGSLRLSCAASGFTFSDYYMSWIRQAPGKGLEWVAYISGISGYTNYADSVRGRFT |
| (3) | ISRDNSKNTLYLQMNSLRAEDTAVYYCAKSKDWVNGGEMDVWGQGTLVTVSSGGGGSGGGGSGGGGSQS |
| | VLTQPPSASGTPGQRVTISCTGSSSNIGAGYVVHWYQQLPGTAPKLLIYSNNQRPSGVPDRFSGSKSGT |
| | SASLAISGLRSEDEADYYCAAWDDSLRGWVFGGXTKLTVLGEQKLISEEDLSGSAA |
| | [SEQ ID NO: 28] |
| IL-12 | EVQLLESGGGLVQPGGSLRLSCAASGFTFSSYSMNWVRQAPGKGLEWVSAIGTGGGTYYADSVKGRFTI |
| (1) | SRDNSKNTLYLQMNSLRAEDTAVYYCARAFRAFDIWGQGTLVTVSSGGGGSGGGGSGGGGSQSVLTQPP |
| | SASGTPGQRVTISCSGSRSNIGNNFVSWYQQLPGTAPKLLIYGNSNRPSGVPDRFSGSKSGTSASLAIS |
| | GLRSEDEADYYCAAWDDSLSGPVFGGXTKLTVLGEQKLISEXDLSGSAA [SEQ ID NO: 29] |
| IL-12 | EVQLLESGGGLVQPGGSLRLSCAASGFTFSDYYMSWVRQAPGKGLEWVSGVSWNGSRTHYADSVKGQFT |
| (2) | ISRDNSKNTLYLQMNSLRAEDTAVYYCARGSRSSPDAFDIWGQGTLVTVSSGGGGSGGGGSGGGGSQSV |
| | LTQPPSASGTPGQRVTISCTGSSSNIGAGYDVHWYQQLPGTAPKLLIYGNSNRPSGVPDRFSGSKSGTS |
| | ASLAISGLRSEDEADYYCAAWDDRVNGRVFGGGTKLTVLGEQKLISEXXLSGSAA |
| | [SEQ ID NO: 30] |
| IL-13 | EVQLLESGGGLVQPGGSLRLSCAASGFTFSSYSMNWVRQAPGKGLEWVSSISSGSSYIYYADSVKGRFT |
| (1) | ISRDNSKNTLYLQMNSLRAEDTAVYYCARSQGWWTYYYGMDVWGQGTLVTVSSGGGGSGGGGSGGGGSQ |
| | SVLTQPPSASGTPGQRVTISCSGSSSNIGSNTVNWYQQLPGTAPKLLIYSNNQRPSGVPDRFSGSKSGT |
| | SASLAISGLRSEDEADYYCETWGQ [SEQ ID NO: 31] |
| IL-13 | EVQLLESGGGLVQPGGSLRLSCAASGFTFSSYSMNWVRQAPGKGLEWVSSISSGSSYIYYADSVKGRFT |
| (2) | ISRDNSKNTLYLQMNSLRAEDTAVYYCARSQGWWTYYYGMDVWGQGTLVTVSSGGGGSGGGGSGGGGSQ |
| | SVLTQPPSASGTPGQRVTISCSGSSSNIGSNTVNWYQQLPGTAPKLLIYSNNQRPSGVPDRFSGSKSGT |
| | SASLAISGLRSEDXADYYCETXDSNTQIFGGXTKLTVLGEQKLISEEXLSGSAXAHHHHHH-SXRXPIX |
| | XIVSXITIHXXSFXNVVTGKXXALPXXXALQHIPXXXAXXXX[SEQ ID NO: 32] |
| IL-13 | EVQLLESGGGLVQPGGSLRLSCAASGFTFSSYSMNWVRQAPGKGLEWVSSISSGSSYIYYADSVKGRFT |
| (3) | ISRDNSKNTLYLQMNSLRAEDTAVYYCARSQGWWTYYYGMDVWGQGTLVTVSSGGGGSGGGGSGGGGSQ |
| | SVLTQPPSASGTPGQRVTISCSGSSSNIGSNWNWYQQLPGTAPKLLIYSNNQRPSGVPDRFSGSKSGTS |
| | ASLAISGLRSEDEADYYCETWDSNTQIFGGXTKLTVLGEQKLISEXDLSGSAA [SEQ ID NO: 33] |
| VEGF | EVQLLESGGGLVQPGGSLRLSCAASGFTFSSNEMSWIRQAPGKGLEWVSSISGSGGFTYYADSVKGRYT |
| (1) | ISRDNSKNTLYLQMNSLRAEDTAVYYCARETTVRGNAFDIWGQGTLVTVSSGGGGSGGGGSGGGGSQSV |
| | LTQPPSASGTPGQRVTISCTGGSSNIGAGYDVHWYQQLPGTAPKLLIYRNNQRPSGVPDRFSGSXSGTS |
| | ASLAISGLRSEDEADYYCAAWDDSLSVPMFGGXTKLTVLGEQKLISEXDLSGSAA |
| | [SEQ ID NO: 34] |
| VEGF | EVQLLESGGGLVQPGGSLRLSCAASGFTFSSYSMNWVRQAPGKGLEWVSGINWNGGSTGYADSVKGRFT |
| (2) | ISRDNSKNTLYLQMNSLRAEDTAVYYCASSVGGWYEGDNWFDPWGQGTLVTVSSGGGGSGGGGSGGGGS |
| | QSVLTQPPSASGTPGQRVTISCTGSSSNIGAGYDVHWYQQLPGTAPKLLIYGNSNRPSXVPDRFSGSXS |
| | GTSASLAISGLRSEXEADYYCQSYDGSLSGSVFGGXTKLTVLGEXKLISEXXLSGSAA |
| | [SEQ ID NO: 35] |
| TGF- | EVQLLESGGGLVQPGGSLRLSCAASGFTFSTYAMSWVRQAPGKGLEWVAVVSIDGGTTYYGDPVKGRFT |
| β1 | ISRDNSKNTLYLQMNSLRAEDTAVYYCTRGPTLTYYFDYWGQGTLVTVSSGGGGSGGGGSGGGGSQSVL |
| (1) | TQPPSASGTPGQRVTISCSGSSSNIGSNTVNWYQQLPGTAPKLLIYSNNQRPSGVPDRFSGSKSGTSAS |
| | LAISGLRSEDEADYYCQSYDSSLSGWVFGGXTKLXVLGEQKLISEEDLSGSAA [SEQ ID NO: 36] |
| TGF- | EVQLLESGGGLVQPGGSLRLSCAASGFTFGDYAMSWFRQAPGKGLEWVSGVSWNGSRTHYADSVKGRFT |
| β1 | ISRDNSKNTLYLQMNSLRAEDTAVYYCARDGNRPLDYWGQGTLVTVSSGGGGSGGGGSGGGGSQSVLTQ |
| (2) | PPSASGTPGQRVTISCTGSSSNIGAGYDVHWYQQLPGTAPKLLIYGNSNRPSGVPDRFSGSKSGTSASL |
| | AISGLRSEDEADYYCAAWDDRLNGWVFGGGTKLXVLGEQKLISEXDLSGSAA [SEQ ID NO: 37] |
| TGF- | EVQLLESGGGLVQPGGSLRLSCAASGFTFSDYYIGWIRQAPGKGLEWVSGINWNGGSTGYADSVKGRFT |
| β1 | ISRDNSKNTLYLQMNSLRAEDTAVYYCARRSTPSSSWALPDFFDYWGQGTLVTVSSGGGGSGGGGSGGG |
| (3) | VGSQSLTQPPSASGTPGQRVTISCTGSSSNIGANYDVHWYQQLPGTAPKLLIYSNNQRPSGVPDRFSGS |
| | KSGTSASLAISGLRSEDXADYYCQSYDSSLSGWVFGGXTKLTVLGEQKLISXXXLSGSAA |
| | [SEQ ID NO: 38] |
| TNF- | EVQLLESGGGLVQPGGSLRLSCAASGFTFYSSGMYWVRQAPGKGLEWVSAISGSGGSTYYADSVKGRFT |
| α (1) | ISRDNSKNTLYLQMNSLRAEDTAVYYCARHGYSYSFDYWGQGTLVTVSSGGGGSGGGGSGGGGSDIQMT |
| | QSPSSLSASVGDRVTITCRASQSISSYLNWYQQKPGKAPKLLIYAASSLQSGVPSRFSGSGSGTDFTLT |
| | ISSLQPEDFATYYCQQGVFYPHTFXQGTKLEIKRLXDYKDHDGDYKDHDIDYKDDDXKAA |
| | [SEQ ID NO: 39] |
| TNF- | EVQLLESGGGLVQPGGSLRLSCAASGFTFSSYAMSWVRQAPGKGLEWVSAISGSGGSTYYADSVKGRFT |
| α (2) | ISRDNSKNTLYLQMNSLRAEDTAVYYCARYVSHYTAHWYAYFDYWGQGTLVTVSSGGGGSGGGGSGGGG |
| | SDIQMTQSPSSLSASVGDRVTITCRASQSISSYLNWYQQKPGKAPKLLIYAASSLQSGVPSRFSGSGSG |
| | TDFTLTISSLQPEDFATYYCQQAGYHPLTFGQGTKLEIKRLXDYKDHDXDYKDHDIDYXXXXDXAAXHH |
| | HHHH-SPRWXXXFAL--VXLRALXXXXFXXXXXX[SEQ ID NO: 40] |
| TNF- | EVQLLESGGGLVQPGGSLRLSCAASGFTFGSYSMSWVRQAPGKGLEWVSSISSYYGGTSYADSVKGRFT |
| α (3) | ISRDNSKNTLYLQMNSLRAEDTAVYYCARGAYLDYWGQGTLVTVSSGGGGSGGGGSGGGGSDIQMTQSP |
| | SSLSASVGDRVTITCRASQSISSYLNWYQQKPGKAPKLLIYAASSLQSGVPSRFSGSGSGTDFTLTISS |
| | LQPEDFATYYCQQYYFPFTFGQGTKLEIKRLXXYKDHDGDYKDHDIDYKDDDDKAA |
| | [SEQ ID NO: 41] |
| GM- | EVQLLESGGGLVQPGGSLRLSCAASGFTFSSYGMHWVRQAPGKGLEWVAVISYDGSNKYYADSVKGRFT |
| CSF | ISRDNSKNTLYLQMNSLRAEDTAVYYCARVGGMSAPVDYWGQGTLVTVSSGGGGSGGGGSGGGGSQSVL |
| (1) | TQPPSASGTPGQRVTISCSGSSSNIGSNTVNWYQQLPGTAPKLLIYDNNKRPSGVPDRXSGSKSGTSAS |
| | LAISGLRSEDEADYYCAAWDDSLIGLVVFGGXTKLTVLGEQKLISEXXLSGSAA |
| | [SEQ ID NO: 42] |
| GM- | EVQLLESGGGLVQPGGSLRLSCAASGFTFSSYAMSWVRQAPGKGLEWVAVISYDGSNEDSADSVKGRFT |
| CSF | ISRDNSKNTLYLQMNSLRAEDTAVYYCARGPSLRGVSDYWGQGTLVTVSSGGGGSGGGGSGGGGSQSVL |
| (2) | TQPPSASGTPGQRVTISCTGSSSNIGAGYDVHWYQQLPGTAPKLLIYNDNQRPSXVPDRFSGSKSGTSA |
| | SLAISGLRSEDEADYYCQTWGTGINVIFGGXTKLXVLGEQKLISXEDLSGSAA [SEQ ID NO: 43] |
| GM- | EVQLLESGGGLVQPGGSLRLSCAASGFTFSSYAMSWVRQAPGKGLEWVAVISYDGSNEDSADSVKGRFT |
| CSF | ISRDNSKNTLYLQMNSLRAEDTAVYYCARGPSLRGVSDYWGQGTLVTVSSGGGGSGGGGSGGGGSQSVL |
| (3) | TQPPSASGTPGQRVTISCTGSSSNIGAGYDVHWYQQLPGTAPKLLIYNDNQRPSGVPDRFSGSKSGTSA |
| | SLAISGLRSEDXADYYCQTWGTGINVIFGGXTKLTVLGEXKLISEXXLSGSAA [SEQ ID NO: 44] |
| TNF- | EVQLLESGGGLVQPGGSLRLSCAASGFTFGSSYMYWVRQAPGKGLEWVSSIYGSSSSTSYADSVKGRFT |
| β (1) | ISRDNSKNTLYLQMNSLRAEDTAVYYCARGYYWDYMDYWGQGTLVTVSSGGGGSGGGGSGGGGSDIQMT |
| | QSPSSLSASVGDRVTITCRASQSISSYLNWYQQKPGKAPKLLIYAASSLQSGVPSRFSGSGSGTDFTLT |
| | ISSLQPEDFATYYCQQAWDLPTFGQGTKLEIKRLXXYKDHDGDYKDHDIDXXXTMTRRP |
| | [SEQ ID NO: 45] |
| TNF- | EVQLLESGGGLVQPGGSLRLSCAASGFTFDDYGMSWVRQAPGKGLEWVAVISYDGSNKYYADSVKGRFT |
| β (2) | ISRDNSKNTLYLQMNSLRAEDTAVYYCTRHLGSAMGYWGQGTLVTVSSGGGGSGGGGSGGGGSQSVLTQ |
| | PPSASGTPGQRVTISCTGSSSNIGAGYDVHWYQQLPGTAPKLLIYGNSNRPSXVPDRFSGSXSGTSASL |
| | AISGLRSEDEADYYCQSYDSSLSGWVFGGXTKLTVLXEQKLISXXDLSGSAA [SEQ ID NO: 46] |
| IL- | EVQLLESGGGLVQPGGSLRLSCAASGFTFDTHWMSWVRQAPGKGLEWVSAISGSGGSTYYADSVKGRFT |
| 1ra | ISRDNSKNTLYLQMNSLRAEDTAVYYCARHDYGDYRAFDIWGQGTLVTVSSGGGGSGGGGSGGGGSQSV |
| (1) | LTQPPSASGTPGQRVTISCTGSSSNIGAGWVHWYQQLPGTAPKLLIYGNNNRPSGVPDRFSGSKSGTSA |
| | SLAISGLRSEDEADYYCQSYDSSLSGVVFGGXTKLXVLXEQKLISXEDLSGSAA |
| | [SEQ ID NO: 47] |
| IL- | EVQLLESGGGLVQPGGSLRLSCAASGFTFSKYAMTWVRQAPGKGLEWVSAISGSGGNTYYADSVKGRFT |
| 1ra | ISRDNSKNTLYLQMNSLRAEDTAVYYCARLVRGLYYGMDVWGQGTLVTVSSGGGGSGGGGSGGGGSQSV |
| (2) | LTQPPSASGTPGQRVTISCSGSSSNIGNNAVNWYQQLPGTAPKLLIYGNSNRPSGVPDRFSGSKSGTSA |
| | SLAISGLRSXDEADYYCQTXGTGPVVFGGXTKLTVLGEQKLISXXXXSGSAA [SEQ ID NO: 48] |
| IL- | EVQLLESGGGLVQPGGSLRLSCAVSGFTFSSYSMNWVRQAPGKGLEWVAGIGGRGATTYYVDSVKGRFT |
| 1ra | ISRDNSKNTLYLQMNSLRAEDTAVYYCARLRVVPAARFDYWGQGTLVTVSSGGGGSGGGGSGGGGSQSV |
| (3) | LTQPPSASGTPGQRVTISCSGSSSNIGSNTVNWYQQLPGTAPKLLIYGNSNRPSGVPDRFSGSKSGTSA |
| | SLAISGLRSEDEADYYCQSYDSSLSGPPWVFGGXXKLXVLXEQKLISEEDLSGSAA |
| | [SEQ ID NO: 49] |
| IL-16 | EVQLLESGGGLVQPGGSLRLSCAASGFTFSNHAMSWVRQAPGKGLEWVSGVSWNGSRTHYADSVKGRFT |
| (1) | ISRDNSKNTLYLQMNSLRAEDTAVYYCARAALVQGVKHAFEIWGQGTLVTVSSGGGGSGGGGSGGGGSQ |
| | SVLTQPPSASGTPGQRVTISCSGSSSNIGSNTVNWYQQLPGTALKLLIYRNNQRPSGVPDRFSGSKSGT |
| | SASLAISGLRSEDEADYYCASWDDRLSGLVFGGXTKLTVLGEQKLISEXDLSGSAA |
| | [SEQ ID NO: 50] |
| IL-16 | EVQLLESGGGLVQPGGSLRLSCAASGFTFSNHAMSWVRQAPGKGLEWVSGVSWNGSRTHYADSVKGRFT |
| (2) | ISRDNSKNTLYLQMNSLRAEDTAVYYCARAALVQGVKHAFEIWGQGTLVTVSSGGGGSGGGGSGGGGSQ |
| | SVLTQPPSASGTPGQRVTISCSGSSSNIGSNTVNWYQQLPGTALKLLIYRNNQRPSGVPDRFSGSXSGT |
| | SASLAISGLRSEXEADYYCASWDDRLSGLVFGGXTKLTVLXEQKLISEEDLSGSAA |
| | [SEQ ID NO: 51] |
| IL-18 | EVQLLESGGGLVQPGGSLRLSCAASGFTFSSYGMHWVRQAPGKGLEWVSGINWNGGSTGYADSVKGRFT |
| (1) | ISRDNSKNTLYLQMNSLRAEDTAVYYCARDLRGGRFDPWGQGTLVTVSSGGGGSGGGGSGGGGSQSVLT |
| | QPPSASGTPGQRVTISCTGSSSNIGAGYVVHWYQQLPGTAPKLLIYRNNQRPSGVPDRFSGSXSGTSAS |
| | LAISGLRSEDEADYYCSSXAGSKNLIFGGXTKLTVLGEQKLISXXXLSGSAA [SEQ ID NO: 52] |
| IL-18 | EVQLLESGRGLVQPGGSLRLSCAASGFTFSSYGMHWVRQAPGKGLEWVSAIGTGGDTYYADSVMGRFTI |
| (2) | SRDNSKNTLYLQMNSLRAEDTAVYYCARSPRRGATAGTFDYWGQGTLVTVSSGGGGSGGGGSGGGGSQS |
| | VLTQPPSASGTPGQRVTISCSGSSSNIGSNIVNWYQQLPGTAPKLLIYRNNQRPSGVPDRFSGSKSGTS |
| | ASLAISGLRSEDEADYYCXSYDNSLSGWVFGGXXKLXVLGEXKLISEXDLSGSAA |
| | [SEQ ID NO: 53] |
| MCP- | EVQLLESGGGLVQPGGSLRLSCAASGFTFSSYGMHWVRQAPGKGLEWVSGISWNGGKTHYVDSVKGQFT |
| 4 (1) | ISRDNSKNTLYLQMNSLRAEDTAVYYCARGGYSSGWAFDYWGQGTLVTVSSGGGGSGGGGSGGGGSQSV |
| | LTQPPSASGTPGQRVTISCSGRSSNIESNTVNWYQQLPGTAPKLLIYGNSNRPSGVPDRFSGSKSGTSA |
| | SLAISGLRSEDEADYYCAAWDDRLNAVVFGGXTKLTVLGEQKLISEXDLSGSAA |
| | [SEQ ID NO: 54] |
| IFN-γ | EVQLLESGGGLVQPGGSLRLSCAASGFTFSSYGMHWVRQAPGKGLEWVSGVSWNGSRTHYADSVKGRFT |
| (1) | ISRDNSKNTLYLQMNSLRAEDTAVYYCARGRTGHGWKYYFDLWGQGTLVTVSSGGGGSGGGGSGGGGSQ |
| | SVLTQPPSASGTPGQRVTISCSGSSSNIGNNAVNWYQQLPGTAPKLLIYGNSNRPSXVPDRFSGSXSGT |
| | SASLAISGLRSEDEADYYCQXWGTGLGVFGGXTKLTVLGEXKLISEEXLSGSAAv |
| | [SEQ ID NO: 55] |
| IFN-γ | EVQLLESGGGLVQPGGSLRLSCAASGFTFSRHGFHWVRQGPGKGLEWVSGVSWNGSRTHYADSVKGRFT |
| (2) | ISRDNSKNTLYLQMNSLRAEDTAVYYCARGNWYRAFDIWGQGTLVTVSSGGGGSGGGGSGGGGSQSVLT |
| | QPPSASGTPGQRVTISCSGGSSHIGRNFISWYQQLPGTAPKLLIYAGNSRP [SEQ ID NO: 56] |
| IL-1b | EVQLLESGGGLVQPGGSLRLSCAASGFTFSSYAMSWVRQAPGKGLEWVSYISSSGSTIYYADSVKGRST |
| (1) | ISRDNSKNTLYLQMNSLRAEDTAVYYCARVRQNSGSYAYWGQGTLVTVSSGGGGSGGGGSGGGGSQSVL |
| | TQPPSASGTPGQRVTISCTGTSSNIGAPYDVHWYQQLPGTAPKLLIYGNSNRPSGVPDRFSGSKSGTSA |
| | SLAISGLRSEDXADYYCQSYDSSLSAVVFGGXTKLTVLGEQKLISEXXLSGSAA |
| | [SEQ ID NO: 57] |
| IL-1b | EVQLLESGGGLVQPGGSLRLSCAASGFTFSRYVMTWVRQAPGKGLEWVSLISGGGSATYYADSMKGRFT |
| (2) | ISRDNSKNTLYLQMNSLRAEDTAVYYCAKRVPYDSSGYYPDAFDIWGQGTLVTVSSGGGGSGGGGSGGG |
| | GSQSVLTQPPSASGTPGQRVTISCTGSSSNIGAGYDVHWYQQLPGTAPKLLIYGNSNRPSGVPDQFSGS |
| | KSGTSASLAISGLRSEDEADYYCAAWDDSLNGPVFGGXTXLTXLXEQKLISEEXLSGSAA |
| | [SEQ ID NO: 58] |
| IL-1b | EVQLLESGGGLVQPGGSLRLSCAASGFTFSSYWMSWVRQAPGKGLEWVAVVSYDGNNKYYADSRKGRFT |
| (3) | ISRDNSKNTLYLQMNSLRAEDTAMYYCASYWYTSGWYPYGMDVWGQGTLGTVSSGGGGSGGGGSGGGGS |
| | QSVLTQPPSASGTPGQRVTISCTGSSSNIGAGYDLHWYQQLPGTAPKLLIYRNNQRPSGVPDRFSGSKS |
| | GTSASLAISGLRSEDEADYYCSSYVDNNNLVFGGXTKLTVLXEQKLISEXXLSGSAA |
| | [SEQ ID NO: 59] |
| Eotaxin | EVQLLESGGGLVQPGGSLRLSCAASGFTFSSYWMSWVRQAPGKGLEWVSGVSWNGSRTHYADSVKGRFT |
| (1) | ISRDNSKNTLYLQMNSLRAEDTAVYYCVKGKGTIAMPGRARVGWWGQGTLVTVSSGGGGSGGGGSGGGG |
| | SQSVLTQPPSASGTPGQRVTISCSGSSSNIGNNAVNWYQQLPGTAPKLLIYANSNRPSGVPDRFSGSXS |
| | GTSASLAISGLRSEDEADYYCAAWDDSLSGPVFGGXTKLTVLGEQKLISXXDLSXSAA |
| | [SEQ ID NO: 60] |
| Eotaxin | EVQLLESGGGLVQPGGSLRLSCAASGFTFSAYWMTWVRQAPGKGLEWVSVIYSGGSTYYADSVKGRFTI |
| (2) | SRDNSKNTLYLQMNSLRAEDTAVYYCARQTQQEYFDYWGQGTLVTVSSGGGGSGGGGSGGGGSQSVLTQ |
| | PPSASGTPGQRVTISCFGSNSNIGSSTVNWYQQLPGTAPKLLIYDNDKRPSGVPDRFSGSXSGTSASLA |
| | ISGLRSEDEADYYCAAWDDSLNGPVFGGXTKLTVLGEQKLISXXXLSGSXAAHHHHHH-SPRXPIRPIV |
| | SXXTIHWPSFYNVXTGKXXXLPNXIXXXHIPLSPAXXIXXXPXXXXX[SEQ ID NO: 61] |
| Eotaxin | EVQLLESGGGLVQPGGSLRLSCAASGFTFRGYAMSWVRQAPGKGLEWVSGVSWNGSRTHYADSVKGRFT |
| (3) | ISRDNSKNTLYLQMNSLRAEDTAVYYCARAPAVAGWFDPWGQGTLVTVSSGGGGSGGGGSGGGGSQSVL |
| | TQPPSASGTPGQRVTISCSGSSSNIGSHTVNWYQQLPGTAPKLLIYRNNQRPSGVPDRFSGSKSGTSAS |
| | LAISGLRSEDXADYYCAAWDDSLSGRVXGGGXKLTVLGEQKLISEEDLSGSAA [SEQ ID NO: 62] |
| RANTES | EVQLLESGGGLVQPGGSLRLSCAASGFTFSSYGMHWVRQAPGKGLEWVAVISNDGTKKDYADSVKGRFT |
| (1) | ISRDNSKNTLYLQMNSLRAEDTAVYYCARDASGYDDYYFDYWGQGTLVTVSSGGGGSGGGGSGGGGSQS |
| | VLTQPPSASGTPGQRVTISCTGSSSNIGAGSDVHWYQQLPGTAPKLLIYRDDQRSSGVPDRFSGSKSGT |
| | SAFLAISGLRSEDEADYYCQSYDNSLSGWVIGGXTKLTVLGEQKLISEXXLSGSAA |
| | [SEQ ID NO: 63] |
| RANTES | EVQLLESGGGLVQPGGSLRLSCAASGFTFSSYAMSWVRQAPGKGLEWVSAISGSGGSTYYADSVKGRFT |
| (2) | ISRDNSKNTLYLQMNSLRAEDTAVYYCARDNDYSSDTFDYWGQGTLVTVSSGGGGSGGGGSGGGGSQSV |
| | LTQPPSAFGTPGQRVTISCSGSSSNIGSDYVYWYQQLPGTAPKLLIYSDNQRP [SEQ ID NO: 64] |
| RANTES | EVQLLESGGGLVQPGGSLRLSCAASGFTFSNYGMNWVRQAPGKGLEWVSGVSWNGSRTHYVDSVKRRFT |
| (3) | ISRDNSKNTLYLQMNSLRAEDTAVYYCARPRLRSHNYYGMDVWGQGTLVTVSSGGGGSGGGGSGGGGSQ |
| | SVLTQPPSASGTPGQRVTISCSGSSFKSGKNYVSWYQQLPGTAPKLLIYRNNQRPSGVPDRFSGSKSGT |
| | SASLAISGLRSEDEADYYCAAWDVRVKGVIFGGXTKLTVLGEQKLISEXDLSGSAA |
| | [SEQ ID NO: 65] |
| MCP- | EVQLLESGGGLVQPGGSLRLSCAASGFTFSSYAMSWVRQAPGKGLEWVSGVSWNGSRTHYADSVKGRFT |
| 1 (1) | ISRDNSKNTLYLQMNSLRAEDTAVYYCARGGHQQLGQWGQGTLVTVSSGGGGSGGGGSGGGGSQSVLTQ |
| | PPSASGTPGQRVTISCSGSSSNIGNNYVSWYQQLPGTAPKLLIYRDSRRPSGVPDRFSGSKSGTSASLA |
| | ISGLRSEXEADYYCAAWDDSLKGWLFGGXTKLTVLXEQKLISEXXLSGSAA [SEQ ID NO: 66] |
| MCP- | EVQLLESGGGLVQPGGSLRLSCAASGFTFSSYAMSWVRQAPGKGLEWVSYISSSSSYTNYADSVKGRFT |
| 1 (2) | ISRDNSKNTLYLQMNSLRAEDTAVYYCARFRYNSGKMFDYWGQGTLVTVSSGGGGSGGGGSGGGGSQSV |
| | LTQPPSASGTPGQRVTISCSGSSSNIGRNTVNWYQQLPGTAPKLLIYGNSNRRSGVPDRFSGSKSGTSA |
| | SLAISGLRSEDEADYYCAAWDDSLSGVVFGGXTKLTVLXEQKLISEXDLSGSAA |
| | [SEQ ID NO: 67] |
| MCP- | EVQLLESGGGLVQPGGSLRLSCAASGFTFSNYGMHWVRQAPGKGLEWVAVISYDGSNKYYADSVKGRFT |
| 1 (3) | ISRDNSKNTLYLQMNSLRAEDTAVYYCAKSHYYDTTSFDYWGQGTLVTVSSGGGGSGGGGSGGGGSQSV |
| | LTQPPSASGTPGQRVTISCSGSSSNIGTNPVNWYQQLPGTAPKLLIYDNNKRPSGVPDRFSGSKSGTSA |
| | SLAISGLRSEDXADYYCAAWDDSLSGVVFGGXTKLTVLGEQKLISXEDLSGSAA |
| | [SEQ ID NO: 68] |
| MCP- | EVQLLESGGGLVQPGGSLRLSCAASGFTFSTYGMHWVRQAPGKGLEWVSGVSWNGSRTHYVNSVKRRFT |
| 3 (1) | ISRDNSKNTLYLQMNSLRAEDTAVYYCARVAPGSGKRLRAFDIWGQGTLVTVSSGGGGSGGGGSGGGGS |
| | QSVLTQPPSASGTPGQRVTISCSGSSSNIGNNAVNWYQQLPGTAPKLLIYEVSKRPPGVPDRFSGSKSG |
| | TSASLAISGLRSEDXADYYCSSYAGSSKWVFGGXTKLTVLGEQKLISEEDLSGSAA |
| | [SEQ ID NO: 69] |
| MCP- | EVQLLESGGGLVQPGGSLRLSCAASGFTLSSNYMSWVRQAPGKGLEWVSGISASGHSTHYADSGKARFT |
| 3 (2) | ISRDNSKNTLYLQMNSLRAEDTAVYYCARGKSLAYWGQGTLVTVSSGGGGSGGGGSGGGGSQSVLTQPP |
| | SASGTPGQRVTISCSGSSSNIGNNAVNWYQQLPGTAPKLLIYRNNQRPSGVPDRFSGSKSGTSASLAIS |
| | GLRSEDEADYYCAAWDDSLSVVVFGGXTKLTVLGEQKLISXXXLSGSAA [SEQ ID NO: 70] |
| MCP- | EVQLLESGGGLVQPGGSLRLSCAASGFTFSIYWMSWVRQAPGKGLEWVAYIGGISNIVSYSDSVKGRFT |
| 3 (3) | ISRDNSKNTLYLQMNSLRAEDTAVYYCAKAPGYSSGWGWFDPWGQGTLVTVSSGGGGSGGGGSGGGGSQ |
| | SVLTQPPSASGTPGQRVTISCSGSSSNIGTNSVFWYQQLPGTAPKLLIYGNNNRPSGVPDRFSGSKSGT |
| | SASLAISGLRSEDXADYYCMIWHSSASVFGXXTKLTVLGEQKLISEXXLSGSAA |
| | [SEQ ID NO: 71] |
| B- | EVQLLESGGGLVQPGGSLRLSCAASGFTFSSYAMHWVRQAPGKGLEWVAVIAYDGINEYYGDSVKGRFT |
| galacto- | ISRDNSKNTLYLQMNSLRAEDTAVYYCARGGIYHGFDIWGQGTLVTVSSGGGGSGGGGSGGGGSQSVLT |
| sidase | QPPSASGTPGQRVTISCSGSSSNIGSNYVYWYQQLPGTAPKLLIYDNHKRPSGVPDRFSGSXSGTSASL |
| | AISGLRSEDEADYYCAAWDDNSWVFGGXTKLTVLGXYKDDDDKAA [SEQ ID NO: 72] |
| Angio- | EVQLLESGGGLVQPGGSLRLSCAASGFTFSDHYMDWVRQAPGKGLEWVSGVSWNGSRTHYADSVKGRFT |
| motin | ISRDNSKNTLYLQMNSLRAEDTAVYYCARDTWAYGAFDIWGQGTLVTVSSGGGGSGGGGSGGGGSQSVL |
| (1) | TQPPSASGTPGQRVTISCSGSNSNIGRNTVNWYQQLPGTAPKLLIYRDNQRPSGVPDRFSGSXSGTPAS |
| | LAISGLRSEDXADYYCAAWDVSLNGWVFGGXTKLTVLGDYXDHDGDYKDHDIDXXDDDDXXAAHHHHH |
| | H-SPRWXIRPIVSRITIXWXXFYXVXXXKXX [SEQ ID NO: 73] |
| Angio- | EVQLLESGGGLVQPGGSLRLSCAASGFTFNDYYMTWIRQAPGKGLEWVSYISSSGSTIYYADSVKGRFT |
| motin | ISRDNSKNTLYLQMNSLRAEDTAVYYCARERLPDVFDVWGQGTLVTVSSGGGGSGGGGSGGGGSQSVLT |
| (2) | QPPSASGTPGQRVTISCSGSGSNIGTNSVSWYQQLPGTAPKLLIYFDDLLPSGVPDRFSGSKSGTSASL |
| | AISGLRSEDEADYYCAAWDDSLSGVVFGGXTKLTVLGXYKDHDGDYKDHDIDYKDDDXKAXAHHHHHH- |
| | SPRXXXRXIVSXIXIHXXXFYNXXTGKTXXXXXXIXXAAXXXFXX[SEQ ID NO: 74] |
| Leptin | EVQLLESGGGLVQPGGSLRLSCAASGFTFGDFAMSWVRQAPGKGLEWVANIKQDGSVKYYVDSVKGRFT |
| | ISRDNSKNTLYLQMNSLRAEDTAVYYCARFLAGFYYGMDVWGQGTLVTVSSGGGGSGGGGSGGGGSQSV |
| | LTQPPSASGTPGQRVTISCSGSDSNIGGNTVNWYQQLPGMAPKLLIYYDDLLPSGVPDRFSGSKSGTSA |
| | SLAISGLRSEDEADYYCAAYDDTMNGWGFGGXTKLTVLGXYKDXDDKAA [SEQ ID NO: 75] |
| Integrin | EVQLLESGGGLVQPGGSLRLSCAASGFTFSTYNMNWVRQAPGKGLEWVSTISGSGGRTYYADSVKGRFT |
| a10 | ISRDNSKNTLYLQMNSLRAEDTAVYYCARDRVATLDAFDIWGQGTLVTVSSGGGGSGGGGSGGGGSQSV |
| | LTQPPSASGTPGQRVTISCSGSSSNIGSNSVSWYQQLPGTAPKLLIYSNNQRPSGVPDRFSGSKSGTSA |
| | SLAISGLRSEDEADYYCAAWDDSLSGVVFGGXTKLTVLGEQKLISEXDLSGSAA |
| | [SEQ ID NO: 76] |
| Integrin | EVQLLESGGGLVQPGGSLRLSCAASGFTFRRDWMSWVRQVPGKGLEWVSVISGSDGSTYYADSVKGRFT |
| a11 | ISRDNSKNTLYLQMNSLRAEDTAVYYCASYSPLGNWFDSWGQGTLVTVSSGGGGSGGGGSGGGGSQSVL |
| | TQPPSASGTPGQRVTISCTGSSSNIGAGYDVHWYQQLPGTAPKLLIYSDTYRPSGVPDRFSGSXSGTSA |
| | SLAISGLRSEDEADYYCQSYDSSLXGFVVFGGXTKLTVLXEQKLISEXXLSGSAA |
| | [SEQ ID NO: 77] |
| IgM | EVQLLESGGGLVQPGGSLRLSCAASGFTFSDYYMSWIRQAPGKGLEWVSAIGSGPYYAHSVRDRFTISR |
| (1) | DNSKNTLYLQMNSLRAEDTAVYYCARGGVEASFDYWGQGTLVTVSSGGGGSGGGGSGGGGSQSVLTQPP |
| | SASGTPGQRVTISCTGSSSNIGAGYDVHWYQQLPGTAPKLLIYGNTNRPSGVPNRFSGSKSGTSASLAI |
| | SGLRSEDEADYYCQSYDNDLSGWVFGGXTKLXVLGEQKLISXXXLSGSAA [SEQ ID NO: 78] |
| LDL | EVQLLESGGGLVQPGGSLRLSCAASGFTFSDYYMSWVRQAPGKGLEWVSGVSWNGSRTHYADSVKGRFT |
| (1) | ISRDNSKNTLYLQMNSLRAEDTAVYYCARAARYSYYYYGMDVWGQGTLVTVSSGGGGSGGGGSGGGGSQ |
| | SVLTQPPSASGTPGQRVTISCSGSSSNIGNNAVNWYQQLPGTAPKLLIYGNDRRPSGVPDRFSGSKSGT |
| | SASLAISGLRSEDEADYYCQTWGTGRGVFGGGTKLTVLGEQKLISEXXLSGSAA |
| | [SEQ ID NO: 79] |
| LDL | EVQLLESGGGLVQPGGSLRLSCAASGFTFSNAWMSWVRQAPGKGLEWVSSISTSSNYIYYADSVKGRFT |
| (2) | ISRDNSKNTLYLQMNSLRAEDTAVYYCARVKKYSSGWYSNYAFDIWGQGTLVTVSSGGGGSGGGGSGGG |
| | GSQSVLTQPPSASGTPGQRVTISCSGSSSSIGNNFVSWYQQLPGTAPKLLIYDNNKRPSXVPDRFSGSX |
| | SGTSASLAISGLRSEDXADYYCAAWDDSLNGWVFGGXTKLTVLXXYKDHDGDYXDHDIDYKDXXDKAA |
| | [SEQ ID NO: 80] |
| PSA | EVQLLESGGGLVQPGGSLRLSCAASGFTFRSYEMNWVRQAPGKGLEWVAVIGGNGVDTDYADSVKGRFT |
| | ISRDNSKNTLYLQMNSLRAEDTAVYYCVREEVDFWSGYYSYGMDVWGQGTLVTVSSGGGGSGGGGSGGG |
| | GSQSVLTQPPSASGTPGQRVTISCSGSSSNIGDNFVSWYQQLPGTAPKLLIYRTNGRPSGVPDRFSGSX |
| | SGTSASLAISGLRSEDEADYYCATWDDNLNGRVVFGGXTKLWLGDYKDXXDKAA |
| | [SEQ ID NO: 81] |
| Lewis | EVQLLESGGGLVQPGGSLRLSCAASGFTFSNYWMHWVRQAPGKGLEWVANIKEDGSEKYYVDSVKGRFT |
| x (1) | ISRDNSKNTLYLQMNSLRAEDTAVYYCAREGETSFGLDVWGQGTLVTVSSGGGGSGGGGSGGGGSQSVL |
| | TQPPSASGTPGQRVTISCSGSSSNIGSNTVNWYQQLPGTAPKLLIYSNNQRPSGVPDRFSGSKSGTSAS |
| | LAISGLRSEDEADYYCASWDDSLSGWVFGGXTKLTVLGDYKDDDDKAA [SEQ ID NO: 82] |
| Lewis | EVQLLESGGGLVQPGGSLRLSCAASGFTFSRYWMHWVRQAPGKGLEWVANIKPDGSEQYYADSVKGRFT |
| x (2) | ISRDNSKNTLYLQMNSLRAEDTAVYYCAREGLSSGWSYGMDVWGQGTLVTVSSGGGGSGGGGSGGGGSQ |
| | SVLTQPPSASGTPGQRVTISCSGSNSNIGSNTVNWYQQLPGTAPKLLIYTNINRPSGVPDRFSGSKSGT |
| | SASLAISGLRSXDEADYYCATWDDSLSGWVFGGXTKLTVLGXYKDXXDKAA [SEQ ID NO: 83] |
| Lewis | EVQLLESGGGLVQSGGSLRLSCAASGFTFSSYTLHWVRQAPGKGLEYVSAISSNGGSTYYADSVKGRFT |
| y | ISRDNSKNTLYLQMNSLRAEDTAVYYCASDVYGDYPRGLDYWGQGTLVTVSSGGGGSGGGGSGGGGSQS |
| | VLTQPPSASGTPGQRVTISCSGTTSNIGSNYVHWYQQLPGTAPKLLIYGNNNRPSGVPDRFSGSKSGTS |
| | ASLAISGLRSEDXADYYCQSYDRSLGGLRVFGGXTKLTVLXDYKXDDDKAA [SEQ ID NO: 84] |
| Sialyl | EVQLLESGGGLVQPGGSLRLSCAASGFTLSSYAMSWVRQAPGKGLEWVSSISSGNSYIYYADSVKGRFT |
| x | ISRDNSKNTLYLQMNSLRAEDTAVYYCARGRGRGGGFELWGQGTLVTVSSGGGGSGGGGSGGGGSQSVL |
| | TQPPSASGTPGQRVTISCSGSSSNIGTYTVNWYQQLPGTAPKLLIYSNNQRPSGVPDRFSGSKSGTSAS |
| | LAISGLRSEXEADYYCSSNAGIDNILFGGXTKLTVLGEQKLISEXDLSGSXAAHHHHXXXXXXXXIXXX |
| | XXXXXXXXXXXXXXXLXX [SEQ ID NO: 85] |
| Pro- | EVQLLESGGGLVQPGGSLRLSCAASGFTFSSYAMSWVRQAPGKGLEWVSSMSASGGSTYYADSVKGRFT |
| cathepsin | ISRDNSKNTLYLQMNSLRAEDTAVYYCARDRGSYGMDVWGQGTLVTVSSGGGGSGGGGSGGGGSQSVLT |
| W | QPPSASGTPGQRVTISCSGSTSNIGSYAVNWYQQLPGTAPKLLIYGNNNRPSGVPDRFSGSXSGTSASL |
| | AISGPRSEDEADYYCAAWDDSLNGGVFGGXTKLTVLGXYKXDDDKAA [SEQ ID NO: 86] |
| BTK | EVQLLESGGGLVQPGGSLRLSCAASGFTFSNYAMSWVRQAPGKGLEWVSGINWNGGSTGYADSVKGRFT |
| (1) | ISRDNSKNTLYLQMNSLRAEDTAVYYCAKHLKRYSGSSYLFDYWGQGTLVTVSSGGGGSGGGGSGGGGS |
| | QSVLTQPPSASGTPGQRVTISCSGSSSXIGSNYVYWYQQLPGTAPKLLIY [SEQ ID NO: 87] |
| Digoxin | EVQLLESGGGLVQPGGSLRLSCAASGFTFSSYAMSWVRQAPGKGLEWVAVIWHDGSSKYYADSVKGRFT |
| | ISRDNSKNTLYLQMNSLRAEDTAVYYCARATGDGFDYWGQGTLVTVSSGGGGSGGGGSGGGGSQSVLTQ |
| | PPSASGTPGQRVTISCSGSSSNIGSNYVYWYQQLPGTAPKLLIYRNNQRPSGVPDRFSGSKSGTSASLA |
| | ISGLRSEDEADYYCAAWDDSLNGVVFGGXTKLTVLGEQKLISXXXLSXSAA [SEQ ID NO: 88] |
| GLP- | EVQLLESGGGLVQPGGSLRLSCAASGFTFRSYGMHWVRQAPGKGLEWVSGLSWNSAGTGYADSVKGRFT |
| 1 R | ISRDNSKNTLYLQMNSLRAEDTAVYYCAKEMGNNWDHIDYWGQGTLVTVSSGGGGSGGGGSGGGGSQSV |
| | LTQPPSASGTPGQRVTISCTGSSSNIGAGYDVHWYQQLPGTAPKLLIYGNSNRPSGVPDRFSGSKSGTS |
| | ASLAISGLRSEDEADYYCAAWDDGLSGPVFGGGTKLTXLGEQKLISEEDLSGSAA |
| | [SEQ ID NO: 89] |
| GLP- | EVQLLESGGGLVQPGGSLRLSCAASGFTFNSYGMHWVRQAPGKGLEWVSAISGSGGSTYYAESVKGRST |
| 1 | ISRDNSKNTLYLQMNSLRAEDTAVYYCVTRNAVFGFDVWGQGTLVTVSSGGGGSGGGGSGGGGSQSVLT |
| | QPPSASGTPGQRVTISCTGSSSNIGAGFDVHWYQQLPGTAPKLLIYDNNKRPSGVPDRFSGSKSGTSAS |
| | LAISGLRSEDEADYYCQSFDSSLSGVVIGGXTKLTVLXEQKLISXEXLSGSAA [SEQ ID NO: 90] |
| C1q | EVQLLESGGGLVQPGGSLRLSCAASGFTFDDYGMSWVRQVPGKGLEWVSAISGSGATTFYAHSVQGRFT |
| | ISRDNSKNTLYLQMNSLRAEDTAVYYCARGGRGYDWPSGAFDIWGQGTLVTVSSGGGGSGGGGSGGGGS |
| | QSVLTQPPSASGTPGQRVTISCTGSSSNIGAGYDVHWYQQLPGTAPKLLIYENNKRPSXVPDRFSGSKS |
| | GTSASLAISGLRSEDXADYYCAAWDDSVNGYVVFGGXTKLTVLGEQKLISEXXLSGSAAXXHHHHH-SP |
| | RWPIRPIXSRXTIXXPSFYXXXXXXTXXLPXXIXXXHXPXXXXXX [SEQ ID NO: 91] |
| C1s | EVQLLESGGGLVQPGGSLRLSCAASGFTFSSYAMSWVRQAPGKGLEWVSGVSWNGSRTHYADSVKGRFT |
| | ISRDNSKNTLYLQMNSLRAEDTAVYYCARHMKAAAYVFEIWGQGTLVTVSSGGGGSGGGGSGGGGSQSV |
| | LTQPPSASGTPGQRVTISCSGSSSNIGSTAVNWYQQLPGTAPKLLIYSNNKRPSGVPDRFSGSXSGTSA |
| | SLAISGLRSEDEADYYCAAWDDRLNGNVLFGGXXKLTVLXEQXLISXXXLSGSAA |
| | [SEQ ID NO: 92] |
| C3 | EVQLLESGGGLVQPGGSLRLSCAASGFTFSSYAMSWVRQAPGKGLEWVSSVTGSGGGTYYADSVFGRFT |
| (1) | ISRDNSKNTLYLQMNSLRAEDTAVYYCARYRWFGNDAFDIWGQGTLVTVSSGGGGSGGGGSGGGGSQSV |
| | LTQPPSASGTPGQRVTISCSGSASNLGMHFVSWYQQLPGTAPKLLIYGNSNRPSGVPDRFSGSKSGTSA |
| | SLAISGLRSEDEADYYCAAWDDTLNIWVFGGXTKLTVLGEQKLISXXXLSGSAA |
| | [SEQ ID NO: 93] |
| C3 | EVQLLESGGGLVQPGGSLRLSCAASGFTFSTYRMIWVRQAPGKGLEWVSSISGSNTYIHYADSVRGRFT |
| (2) | ISRDNSKNTLYLQMNSLRAEDTAVYYCARDRHPLLPSGMDVWGQGTLVTVSSGGGGSGGGGSGGGGSQS |
| | VLTQPPSASGTPGQRVTISCSGSSSNIGKHPVNWYQQLPGTAPKLLIYRNDQRPSGVPDRFSGSKSGTS |
| | ASLAISGLRSEDXADYYCQSYDSSLSGSWVFGGXTKLTVLGXQKLISEEDLSGSAA |
| | [SEQ ID NO: 94] |
| C4 | EVQLLESGGGLVQPGGSLRLSCAASGFTFSSYPMSWVRQAPGKGLEWVSTLYAGGWTSYADSVWGRFTI |
| (1) | SRDNSKNTLYLQMNSLRAEDTAVYYCARPKVESLSRYGMDVWGQGTLVTVSSGGGGSGGGGSGGGGSQS |
| | VLTQPPSASGTPGQRVTISCTGSSSNIGAGYVVHWYQQLPGTAPKLLIYDNSKRPSGVPDRFSGSKSGT |
| | SASLAISGLRSEDEADYYCQSYDSSLSGVVFGGXTKLTVLXEQKLISEXXLSGSAA |
| | [SEQ ID NO: 95] |
| C5 | EVQLLESGGGLVQPGGSLRLSCAASGFTFSSYRMNWVRQAPGKGLEWVSAISGSGGSTYYADSVKGRFT |
| (1) | ISRDNSKNTLYLQMNSLRAEDTAVYYCARGGGWFSGHYYFDYWGQGTLVTVSSGGGGSGGGGSGGGGSQ |
| | SVLTQPPSASGTPGQRVTISCTGATSNIGAGYDVHWYQQLPGTAPKLLIYRNNQRPSXVPDRFSGSXSG |
| | TSASLAIXGLRSEDXADYYCQSYDSSLRHWVFXGXXKLTVLXEQKLISEXXLSGSXA |
| | [SEQ ID NO: 96] |
| C5 | EVQLLESGGGLVQPGGSLRLSCAASGFTFSAYSMNWVRQAPGKGLEWVSGVSWNGSRTHYADSVKGRFT |
| (2) | ISRDNSKNTLYLQMNSLRAEDTAVYYCARENSGFFDYWGQGTLVTVSSGGGGSGGGGSGGGGSQSVLTQ |
| | PPSASGTPGQRVTISCTGSSSNIGSNTVNWYQQLPGTAPKLLIYGNSNRPSGVPDRFSGSKSGTSASLT |
| | ISGLRSEDXADYYCAAWDDSLSGWVFGGXTKLTVLXEQKLISEEXLSGSAA [SEQ ID NO: 97] |
| C1 | EVQLLESGGGLVQPGGSSLSCAASGFTFSDYYMSWIRQAPGKGLEWVSGISRGGEYTFYVDSVKGRFTI |
| inh. | SRDNSKNTLYLQMNSLRAEDTAVYYCARDPGGLDAFDIWGQGTLVTVSSGGGGSGGGGSGGGGSQSVLT |
| (1) | QPPSASGTPGQRVTISCTGSSSNIGARYDVQWYQQLPGTAPKLLIYGNSNRPSGVPDRFSGSKSGTSAS |
| | LAISGLRSEXXADYYCASWDDSLSGPVFGGXTKLTVLXEQKLISEXXLSXSAA [SEQ ID NO: 98] |
| Factor | EVQLLESGGGLVQPGGSLRLSCAASGFTFSSYSMNWVRQAPGKGLEWVAVISYDGRFIYYSDSVKGRFT |
| B | ISRDNSKNTLYLQMNSLRAEDTAVYYCARSYGGNLAMDVWGQGTLVTVSSGGGGSGGGGSGGGGSQSVL |
| (1) | TQPPSASGTPGQRVTISCTGSSSNIGAGYDVHWYQQLPGTAPKLLIYDNNKRPSGVPDRFSGSNSGTSA |
| | SLAISGLRSEDXADYYCAAWDDRLNGRVVFGGXTKLTVLGEQKLISEXDLSGSAA |
| | [SEQ ID NO: 99] |
| IL-12 | EVQLLESGGGLVQPGGSLRLSCAASGFTFSRYGMHWVRQAPGKGLEWVASIRGNARGSFYADSVKGRFT |
| (3) | ISRDNSKNTLYLQMNSLRAEDTAVYYCAKGDSSGWYFFDYWGQGTLVTVSSGGGGSGGGGSGGGGSQSV |
| | LTQPPSASGTPGQRVTISCTGSDSXIGAGFDVHWYQQLPGTAPKLLIYGNNNRPSGVPDRFSGSKSGTS |
| | ASLAISGLRSEDXADYYCQSYDTSLSGVLFGGXXKLTVLGEQKLISEXDLSGSAA |
| | [SEQ ID NO: 100] |
| IL-12 | EVQLLESGGGLVQPGGSLRLSCAASGFTFSDYGMHWVRQAPGKGLEWVSTVSGSGDNTYYADSVKGRFT |
| (4) | ISRDNSKNTLYLQMNSLRAEDTAVYYCTTTWRYWGQGTLVTVSSGGGGSGGGGSGGGGSQSVLTQPPSA |
| | SGTPGQRVTISCSGSSSNIGSNTVNWYQQLPGTAPKLLIYGNSNRPSGVPDRFSGSKSGTSASLAISGL |
| | RSEDEADYYCQSYDSSLSGWVFGGXTKLTVLXEQKLISXEDLSGSAA [SEQ ID NO: 101] |
| IL-16 | EVXLLESGGGLVQPGGSLRLSCAASGFTFSSYGMHWVRQAPGKGLEWVSGINWNGGSTGYADSVKGRFT |
| (3) | ISRDNSKNTLYLQMNSLRAEDTAVYYCARERGDAFDIWGQGTLVTVSSGGGGSGGGGSGGGGSQSVLTQ |
| | PPSASGTPGQRVTISCSGSSSNIGSNWNWYQQLPGTAPKLLIYSDNQRPSGVPDRFSGSKSGTSASLAI |
| | SGLRSXXEADYYCAAWXDSLNGPWVFGGXTKLXVLGEQKLISEEDLSGSAA [SEQ ID NO: 102] |
| IL-18 | EVQLLESGGGLVQPGGSLRLSCAASGFTFSRYGMHWVRQAPGKGLEWVAVISYDGSNKYYADSVKGRFT |
| (3) | ISRDNSKNTLYLQMNSLRAEDTAVYYCARHGYGDSRSAFDIWGQGTLVTVSSGGGGSGGGGSGGGGSQS |
| | VLTQPPSASGTPGQRVTISCTGSSSNIGAGYDVHWYQQLPGTAPKLLIYRNNQRPSGVPDRFSGSXSGT |
| | SASLAISGLRSEXXADYYCQSYDSSLSRWVFGGXTKLXVLGEQKLISXXXLSXSAA |
| | [SEQ ID NO: 103] |
| IL-1a | EVQLLESGGGLVQPGGSLRLSCAASGFTFSSYSMNWVRQAPGKGLEWVSYISSSSSYTNYADSVKGRFT |
| (3) | ISRDNSKNTLYLQMNSLRAEDTAVYYCARSVTRRAGYYYYYSGMDVWGQGTLVTVSSGGGGSGGGGSGG |
| | GGSQSVLTQPPSASGTPGQRVTISCSGSSSXIGSNTVNWYQQLPGTAPKLLIYRNNQRPSXVPDRFSGS |
| | XSGTSASLAISGLRSEDEAXYYCSSXAGSNSXVFGGXTKLTVLGEQKLISXXXLSGSAA |
| | [SEQ ID NO: 104] |
| IL-6 | EVQLLESGGGLVQPGGSLRLSCAASGFTFSNYGMHWVRQAPGKGLEWVSSITSSGDGTYFADSVKGRFT |
| (3) | ISRDNSKNTLYLQMNSLRAEDTAVYYCARAGGIAAAYAFDIWGQGTLVTVSSGGGGSGGGGSGGGGSQS |
| | VLTQPPSASGTPGQRVTISCSGSSSNVGSNYVYWYQQLPGTAPKLLIYDNNKRPSGVPDRFSGSKSGTS |
| | ASLAISGLRSEXEADYYCQSYDSSRWVFGGXTKLTVLGEQKLISEXXLSGSAA |
| | [SEQ ID NO: 105] |
| IL-6 | EVQLLESGGGLVQPGGSLRLSCAASGFTFSSNYMSWVRQAPGKGLEWVSSISSSSTIYYADSVKGRFTI |
| (4) | SRDNSKNTLYLQMNSLRAEDTAVYYCARQPASGTYDAFDIWGQGTLVTVSSGGGGSGGGGSGGGGSQSV |
| | LTQPPSXSGTPGQRVTISCTGSSSNIGAGYDVHWYQQLPGTAPKLLIYYDDLLPSGVPDRFSGSKSGTS |
| | ASLAISXLRSEDEADYYCAVWDDSLSGWVFGGXTKLTVLXEQKLISXXDLSGSAXAHHHHHHXSPRXXI |
| | RPIVSXITIHXXVVLXRRDWEXPXXTQLNXXXAHXPFXXXXNX [SEQ ID NO: 106] |
| IL-8 | EVQXLESGGGLVQPGGSLRLSCAASGFTFDDYGMSWVRQAPGKGLEWVSLISWDGGSTYYADSVKGRFT |
| (3) | ISRDNSKNTLYLQMNSLRAEDTAVYYCARDDLYGMDVWGQGTLVTVSSGGGGSGGGGSGGGGSQSVLTQ |
| | PPSASGTPGQRVTISCTGSSSNIGAGYDVHWYQQLPGTAPKLLIYDNNKRPSGVPDRFSGSKSGTSASL |
| | AISGLRSXDEADYYCAAWDDSLSGWVFGGXTKLTVLGEQKLISEXXLSGSAA [SEQ ID NO: 107] |
| MCP- | EVQLLESGGGLVQPGGSLRLSCAASGFTFSSYGMHWVRQAPGKGLEWVSGISWNGGKTHYVDSVKGQFT |
| 4 (3) | ISRDNSKNTLYLQMNSLRAEDTAVYYCARGGYSSGWAFDYWGQGTLVTVSSGGGGSGGGGSGGGGSQSV |
| | LTQPPSASGTPGQRVTISCSGRSSNIESNTVNWYQQLPGTAPKLLIYGNSNRPSGVPDRFSGSKSGTSA |
| | SLAISGLRSEXEADYYCAAWDDRLNAVVFGGXTKLXVLXEQKLISEXXLSGSAA |
| | [SEQ ID NO: 108] |
| Properdin | EVQLLESGGGLVQPGGSLRLSCAASGFTFSSNYMSWVRQAPGKGLEWVSAISGSGGSTYYADSVKGRFT |
| | ISRDNSKNTLYLQMNSLRAEDTAVYYCAKGGSGWYDYFDYWGQGTLVTVSSGGGGSGGGGSGGGGSQSV |
| | LTQPPSASGTPGQRVTISCTGSSSNIGAGYDVHWYQQLPGTAPKLLIYRNNQRPSGVPDRFSGSKSGTS |
| | ASLAISGLRSEDEAXYYCAAXDDGLNSPVFGGGTKLXVLXEQKLISEEDLSGSAXAHHHHHH-SPRXXI |
| | RPIVSRITIHWXXFXXXXXGKTXXXPXLXXXXXXPPFX [SEQ ID NO: 109] |
| TNF- | EVQLLESGGGLVQPGGSLRLSCAASGFTFSSYGMHWVRQAPGKGLEWVSAISGSGGSTYYADSVKGRFT |
| β (3) | ISRDNSKNTLYLQMNSLRAEDTAVYYCARGGWGPRSAFDIWGQGTLVTVSSGGGGSGGGGSGGGGSQSV |
| | LTQPPSASGTPGQRVTISCSGSSSNIGSNTVTWYQQLPGTAPKLLIYGNTNRLSGVPDRFSGSKSGTSA |
| | SLAISGLRSEDEADYYCEAWDDKLFGPVFGGXTXLTVLXEQKLISEXXLSGSAA |
| | [SEQ ID NO: 110] |
| TNF- | EVQLLESGGGLVQPGGSLRLSCAASGFTFSSYWMSWVRQAPGKGLEWVSGVNWNGSRTHYADSVKGRFT |
| β (4) | ISRDNSKNTLYLQMNSLRAEDTAVYYCASIRANYYYGMDVWGQGTLVTVSSGGGGSGGGGSGGGGSQSV |
| | LTQPPSASGTPGQRVTISCSGGSSNIGSHPVNWYQQLPGTAPKLLIYGNSNRPSGVPDRFSGSKSGTSA |
| | SLAISGLRSEDEADYYCAAWDASLSGWVFGGGXKLTVLXEXKLISXXXLSGSAA |
| | [SEQ ID NO: 111] |
| VFGF | EVQLLESGGGLVQPGGSLRLSCAASGFTFSSYEMNWVRQAPGKGLEWVSGISGSGGFTYYADSVKGRFT |
| (3) | ISRDNSKNTLYLQMNSLRAEDTAMYYCAREGYQDAFDIWGQGTLVTVSSGGGGSGGGGSGGGGSQSVLT |
| | QPPSASGTPGQRVTISCTGSSSNIGAGYDVHWYQQLPGTAPKLLIYSNNQRPSXVPDRFSGSXSGTSAS |
| | LAISGLRSEDXADYYCAAWDDSLSGPPWVFGGGXKLXVLXEQKLISXXXLSGSXAAHHHHHH-SPRXPI |
| | RPIVSXIXIHWPXFYNVXXXXTXXXPXLX [SEQ ID NO: 112] |
| VFGF | EVQLLESGGGLVQPGGSLRLSCAASGFTFXXXYXSWVRQAPGKGLEWVSXISWXXGSIGYADSVKGRFT |
| (4) | ISRDNSKNTLYLQMNSLRAEDTAVYYCXXXXXXXXNYFDYWGQGTLVTVSSGGGGSGGGGSGGGGSQSV |
| | LTQPPSASGTPGQRVTISCSGSNSNIGGNFVYWYQQLPGTAPKLLIYENSKRPSXVPDRFSGSXSGTSA |
| | SLAISGLRSEDXADYYCAAWDDSLXXVVFGGXTKLTVLGEQKLISXXXLSGSAA |
| | [SEQ ID NO: 113] |
| IL-4 | EVQLLESGGGLVQPGGSLRLSCAASGFTFSNAWMSWVRQAPGKGLEWVSAISGSGGSTYYADSVKGRFT |
| (3) | ISRDNSKNTLYLQMNSLRAEDTAVYYCARAIAARPFDYWGQGTLVTVSSGGGGSGGGGSGGGGSQSVLT |
| | QPPSASGTPGQRVTISCTGATSNIGAGYDIHWYQQLPGTAPKLLIYSTNNRPSGVPDRFSGSKSGTSAS |
| | LAISGLRSEDXADYYCAAWDDSLNGPVFGGXXKLTVLGEQKLISEXDLSGSAA |
| | [SEQ ID NO: 114] |
| CD40 | EVQLLESGGGLVQPGGSLRLSCAASGFTFSAYWMHWVRQAPGKGLEWVSGISGGGGSTYYADSVKGRFT |
| (2) | ISRDNSKNTLYLQMNSLRAEDTAVYYCARMTPWYYGMDVWGQGTLVTVSSGGGGSGGGGSGGGGSQSML |
| | TQPPSASGTPGQRVTISCSGSTS [SEQ ID NO: 115] |
| CD40 | EVQLLESGGGLVQPGGSLRLSCAASGFTFSTYGMHWVRQAPGKGLEWLSYISGGSSYIFYADSVRGRFT |
| (3) | ISRDNSENALYLQMNSLRAEDTAVYYCARILRGGSGMDLWGQGTLVTVSSGGGGSGGGGSGGGGSQSVL |
| | TQPPXXSGTPGQRVTISC [SEQ ID NO: 116] |
| CD40 | EVQLLESGGGLVQPGGSLRLSCAASGFTFSTYGMHWVRQAPGKGLEWLSYISGGSSYIFYADSVRGRFT |
| (4) | ISRDNSENALYLQMNSLRAEDTAVYYCARILRGGSGMDLWGQGTLVTVSSGGGGSGGGGSGGGGSQSVL |
| | TQPPSASGTPGQRVTISCTGSSSNIGAGYDVYWYQQLPGTAPKLLIYGNINRPSGVPDRFSGSKSGTSA |
| | SLAISGLRSEDXADYYCAAWDDSLXGLVFGGXXKLTVLXXYKDDDDKAA [SEQ ID NO: 117] |
| IgM | EVQLLESGGGLVQPGGSLRLSCAASGFTFSSYAMSWVRQAPGKGLEWVSGISWNSGSIGYADSVKGRFT |
| (3) | ISRDNSKNTLYLQMNSLRAEDTAVYYCARGDYSSSPGGYYYYMDVWGQGTLVTVSSGGGGSGGGGSGGG |
| | GSQSVLTQPPSASGTPGQRVTISCSGSSSXIGSNTVNWYQQLPGTAPKLLIYGNSNRPSXVPDRFSGXX |
| | SGTSASLAIXGLRSXDXADYYCSSXXSTNTVIFGGXTKLTVLGEQKLISXXDLSGSAA |
| | [SEQ ID NO: 118] |
| IgM | EVQLLESGGGLVQPGGSLRLSCAASGFTFGSYEMNWVRQAPGKGLEWVSVIYSGGSTYYADSVFGRFTI |
| (5) | SRDNSKNTLYLQMNSLRAEDTAVYYCARDTNPYYYYGMDVWGQGTLVTVSSGGGGSGGGGSGGGGSQSV |
| | LTQPPSASGTPGQRVTISCSGSSSNIGNNAVNWYQQLPGTAPKLLIYRNNQRPSXVPDRFSGSXSGTSA |
| | SLAISGLRSEDEADYYCQSYDSSLNGQVFGGXTKLTVLXEQKLISXEXLSGSAA |
| | [SEQ ID NO: 119] |
| HLA- | EVQLLESGGGLVQPGGSLRLSCAASGFTFSSYAMSWVRQAPGKGLEWVSAISGSGGSTYYADSVKGRFT |
| DR/ | ISRDNSKNTLYLQMNSLRAEDTAVYYCARDGLLPLDYWGQGTLVTVSSGGGGSGGGGSGGGGSQSVLTQ |
| DP | PPSASGTPGQRVTISCSGGSSNIGGNAVNWYQQLPGTAPKLLIYENNKRPSXVPDRFSGSXSGTSASLA |
| | ISGLRSEDXADYYCSSYAVSNNFEVLFGGXTKLTVLXEQKLISXXDLSGSAA [SEQ ID NO: 120] |
| ICAM- | EVCILLESGGGLVQPGGSLRLSCAASGFTFSNAWMSWVRQAPGKGLEWVAFIWYDGSNKYYADSVKGRF |
| 1 | TISRDNSKNTLYLQMNSLRAEDTAVYYCARYSGWYFDYWGQGTLVTVSSGGGGSGGGGSGGGGSQSVLT |
| | QPPSASGTPGQRVTISCTGSSSXIGAGYDVHWYQQLPGTAPKLLIYDNNNRPSXVPDRFSGSXSGTSAS |
| | LAISGLRSEDEADYYCQSYDSSLSAWLFGGXTKLTVLGEQKLISXXDLSGSXAAHHHHHH-SPRWPIRX |
| | IVSXXTIXXPXFYXVXXXKPXXTXLXRXXAHPXX [SEQ ID NO: 121] |
| IgM | EVQLLESGGGLVQPGGSLRLSCAASGFTFSDYYMSWIRQAPGKGLEWVSAIGSGPYYAHSVRDRFTISR |
| (2) | DNSKNTLYLQMNSLRAEDTAVYYCARGGVEASFDYWGQGTLVTVSSGGGGSGGGGSGGGGSQSVLTQPP |
| | SASGTPGQRVTISCTGSSSNIGAGYDVHWYQQLPGTAPKLLIYGNTNRPSXVPNRFSGSXSGTSASLAI |
| | SGLRSEDEADYYCQSYDNDLSGWVFGGXTKLITVLGEQKLISEEXLSGSAA [SEQ ID NO: 122] |
| MUC- | EVQLLESGGGLVQPGGSLRLSCAASGFTFKNYWMSWVRQAPGKGLEWVSDISGGGGTTYIADSVKGRFT |
| 1 (2) | ISRDNSKNTLYLQMNSLRAEDTAVYYCARIHSGSYYFDYWGQGTLVTVSSGGGGSGGGGSGGGGSQSVL |
| | TQPPSASGTPGQRVTISCTGSSSNIGAGYDVHWYQQLPGTAPKLLIYKNNQRPSGVPDRFSGSKSGTSA |
| | SLAIXGLRSEDEADYYCA [SEQ ID NO: 123] |
| MUC- | EVQLLESGGGLVQPGGSLRLSCAASGFTFKNYWMSWVRQAPGKGLEWVSDISGGGGTTYIADSVKGRFT |
| 1 (4) | ISRDNSKNTLYLQMNSLRAEDTAVYYCARIHSGSYYFDYWGQGTLVTVSSGGGGSVGGGSGGGGSQSVL |
| | TQPPSASGTSGQRVTISCTGSSSNIGAGYDVHWYQQLPGTAPKLLIYKNNQRPSGVPDRFSGSXSGTSA |
| | SLAISGLRSEDEADYYCAAXDDSLNGPVFGGXTKLTVLGDYKDHDGDYXDHDIDXXDXDXKAA |
| | [SEQ ID NO: 124] |
| MUC- | EVQLLESGGGLVQPGGSLRLSCAASGFTFKNYWMSWVRQAPGKGLEWVSDISGGGGTTYIADSVKGRFT |
| 1 (5) | ISRDNSKNTLYLQMNSLRAEDTAVYYCARIHSGSYYFDYWGQGTLVTVSSGGGGSGGGGSGGGGSQSVL |
| | TQPPSASGTPGQRVTISCTGSSSNIGADYDVHWYQQLPGTAPKLLIYKNNQRPSGVPDRFSGSKSGTSA |
| | SLAISGLRSEDXADYYCAVWDDSLNGPXFGGXTKLTVLXDYKXHDGDYKDHDIDXKDDDDKAA |
| | [SEQ ID NO: 125] |
| MUC- | EVQLLESGGGLVQPGGSLRLSCAASGFTFKNYWMSWVRQAPGKGLEWVSDISGGGGITYIADSVKGRFT |
| 1 (6) | ISRDNSRNTLYLQMNSLRAEDTAVYYCARIHSGSYYFDYWGQGTLVTVSSGGGGSGGGGSGGGGSQSVL |
| | TQPPSASGTPGQKVTISCTGSSSNIGAGYDVHWYQQLPGTAPKLLIYKNNQRPSGVPDRFSGSRSGTSA |
| | SLAISGLRSEDEADYYCAAWDDSLNGPVFGGXXKLTVLXDYXDHDGDYKDHDIDYKXXDDKAA |
| | [SEQ ID NO: 126] |
| MCP- | QSVLTQPASASGTPGQRVTISCTGNSSNIGAGYDVHWYQQLPGTAPKLLIYRNNQRPSGVPDRFSGSKS |
| 1 (5) | GTSASLAISGLLSEDEADYYCAAWDYSLNGWVFGGGTKLTVLG [SEQ ID NO: 127] |
| MCP- | QSVLTQPSSASGTPGQRVTISCTGNSSNIGAGYDVHWYQQLPGTAPNLLIYRNNQRPSGVPDRFSGSKS |
| 1 (6) | GTSASLAISGLRSEDEADYYCAAWDDSLNGWVFGGGTKLTVLGQ [SEQ ID NO: 128] |
| Cystatin | EVQLLESGGGLVQPGGSLRLSCAASGFTFSSYAMNWVRQAPGKGLEWVGLISYDGRTTYYADSVKGRST |
| C (1) | ISRDNSKNTLYLQMNSLRAEDTAVYYCATTTGTTLDYWGQGTLVTVSSGGGGSGGGGSGGGGSQSVLTQ |
| | PPSASGTPGQRVTISCTGSSSNIGAGYDVHWYQQLPGTAPKLLIYGNTNRPSXVPDRFSGSXSGTSASL |
| | AISGLRSEDEADYYCAAWDDSLYGWVFGGXTKLTVLGDYXDHDGDYXDHDIDXXDDDDKAA |
| | [SEQ ID NO: 129] |
| Cystatin | EVQLLESGGGLVQPGGSLRLSCAASGFTFSSYAMNWVRQAPGKGLEWVGLISYDGRTTYYADSVKGRST |
| C (4) | ISRDNSKNTLYLQMNSLRAEDTAVYYCATTTGTTLDYWGQGTLVTVSSGGGGSGGGGSGGGGSQSVLTQ |
| | PPSASGTPGQRVTISCTGSSSNIGAGYDVHWYQQLPGTAPKLLIYGNTNRPSXVPDRFSGSXSGTSXSL |
| | AISGLRSXDEADYYCAAWDDSLYGWVFGG [SEQ ID NO: 130] |
| Apo- | EVQLLESGGGLVQPGGSLRLSCAASGFTFSNNGMHWVRQAPGKGLEWVSAISASGGSTYYADSVKGRFT |
| A1 | ISRDNSKNTLYLQMNSLRAEDTAVYYCATHGGSSYDAFDIWGQGTLVTVSSGGGGSGGGGSGGGGSQSV |
| (1) | LTQPPSASGTPGQRVTISCTGSSSNIGAGYVVHWYQQLPGTAPKLLIYG [SEQ ID NO: 131] |
| Apo- | EVQLLESGGGLVQPGGSLRLSCAASGFTFRDYYMSWIRQAPGKGLEWVAVTSYDGSKKYYADSVKGRFT |
| A1 | ISRDNSKNTLYLQMNSLRAEDTAVYYCAKDYADDSIAAPAFDIWGQGTLVTVSSGGGGSGGGGSGGGGS |
| (2) | QSVLTQPPSASGTPGQRVTISCTGSSSXIGAGYDVHWYQQLPGTAPKLLIYGNSNRPS |
| | [SEQ ID NO: 132] |
| Apo- | EVXXLESGGGLVQPGGSLRLSCAASGFTFRDYYMSWIRQAPGKGLEWVAVTSYDGSKKYYADSVKGRFT |
| A1 | ISRDNSKNTLYLQMNSLRAEDTAVYYCAKDYADDSIAAPAFDIWGQGTLVTVSSGGGGSGGGGSGGGGS |
| (3) | QSVLTQPPSASGTPGQRVTISCTGSSSNIGAGYDVHWYQQLPGTAPKLLIYGNSNRPSGVPDRFSGSKS |
| | GTSASLAISGLRSXDEAXYYCQSYDSSLSVVFGGGTKLTVLXXYXDHDGDYKDHDIDYXDDXXXAXAHH |
| | HHHH-SPXXXIRXXXSXXTIHXXXXXXXXDWXXXXXXXXX[SEQ ID NO: 133] |
| Factor | EVQLLESGGGLVQPGGSLRLSCAASGFTFSSYSMNWVRQAPGKGLEWVAVISYDGRFIYYSDSVKGRFT |
| B (2) | ISRDNSKNTLYLQMNSLRAEDTAVYYCARSYGGNLAMDVWGQGTLVTVSSGGGGSGGGGSGGGGSQSVL |
| | TQPPSASGTPGQRVTISCTGSSSNIGAGYDVHWYQQLPGTAPKLLIYDNNKRPSGVPDRFSGSNSGTSA |
| | SLAISGLRSEDEADYYCAAWDDRLNGRVVFGGXTKLTVLGDYXDHDGDYKDHDIDXKDDDXKAA |
| | [SEQ ID NO: 134] |
| C1 | EVQLLESGGGLVQPGGSLRLSCAASGFTFSNAWMSWVRQAPGKGLEWVSAISGSGGSTYYADSVKGRFT |
| inh. | ISRDNSKNTLYLQMNSLRAEDTAVYYCARNRGNWGTYYFDYWGQGTLVTVSSGGGGSGGGGSGGGGSQS |
| (2) | VLTQPPSASGTPGQRVTISCSGSSSNIGSNYVSWYQQLPGTAPKLLIYGSSNRPSGVPDRFSGSXSGTS |
| | ASLAISGLRSEDEADYYCQSYDSSLSDHVVFGGXTKLTVLXDYXDHDGDYKDHDIDXXDDDDXAA |
| | [SEQ ID NO: 135] |
| C1 | EVQLLESGGGLVQPGGSLRLSCAASGFTFSNAWMSWVRQAPGKGLEWVSAISGSGGSTYYADSVKGRFT |
| inh. | ISRDNSKNTLYLQMNSLRAEDTAVYYCARNRGNWGTYYFDYWGQGTLVTVSSGGGGSGGGGSGGGGSQS |
| (3) | VLTQPPSASGTPGQRVTISCSGSSSXIGSNYVSWYQQLPGTAPKLLIYGSSNRPSXVPDRFSGSXSGTS |
| | ASLAISGLRSEDXADYYCQSYDSSLSDHVVFGGXTKLTVLGDYXDHDGDYKDHDXDXXDDXXXAA |
| | [SEQ ID NO: 136] |
| C5 | EVQLLESGGGLVQPGGSLRLSCAASGFTFSSYGMHWVRQAPGKGLEWVSYISSSGSTIYYADSVKGRFT |
| (3) | ISRDNSKNTLYLQMNSLRAEDTAVYYCLTLGGYWGQGTLVTVSSGGGGSGGGGSGGGGSQSVLTQPPSA |
| | SGTPGQRVTISCSGSSSNIGSNTVNWYQQLPGTAPKLLIYSNNQRPSGVPDRFSGSKSGTSASLAISGL |
| | RSXDEADYYCQSYDSSLSGWVFGGXTKLTVLXDYKXHDGDYKDHDIDXKDDDXXAA |
| | [SEQ ID NO: 137] |
| C4 | EVQLLESGGGLVQPGGSLRLSCAASGFTFSSYAMSWVRQAPGKGLEWVSAISGSGGSTYYADSVKGRFT |
| (3) | ISRDNSKNTLYLQMNSLRAEDTAVYYCARGWSTSSFDYWGQGTLVTVSSGGGGSGGGGSGGGGSQSVLT |
| | QPPSASGTPGQRVTISCSGSSSXIGNHYVSWYQQLPGTATKLLIYXDDLLPSXVPDRFSGSXSGTSASL |
| | AIXGLRSEDEADYYCAAWDDRSGQVLFGGXTKLTVLGDYXDHDGDYXDHDIDXXDDDXKAXAHHHHHH- |
| | XXRWPIRPXVSXXTIHXXXFXXXXXXKT [SEQ ID NO: 138] |
| C4 | EVQLLESGGGLVQPGGSLRLSCAASGFTFSSYSMNWVRQAPGKGLEWVSGISGSGGSTYYADSVKGRFT |
| (4) | ISRDNSKNTLYLQMNSLRAEDTAVYYCAKHSGYGFDIWGQGTLVTVSSGGGGSGGGGSGGGGSQSVLTQ |
| | PPSASGTPGQRVTISCSGGASXLGMHFVSWYQQLPGTAPKLLIYYDDLLPSGVPDRFSGXXSGTSASLA |
| | ISGLRSEDEADYYCAAWDDSLNGWVFGGXTKLXVLGDYXDXXGDYKDHDIDXKDXXXXAXAHXHHHH-S |
| | PXWXXRPIVXXITXXXXVXLQRXDWXXPXVXXXXXXXXXXPX [SEQ ID NO: 139] |
| C3 | EVQLLESGGGLVQPGGSLRLSCAASGFTFSSYAMNWVRQAPGKGLEWVANINQDGSTKFYVDSVKGRFT |
| (3) | ISRDNSKNTLYLQMNSLRAEDTAVYYCARDTGGNYLGGYYYYGMDVWGQGTLVTVSSGGGGSGGGGSGG |
| | GGSQSVLTQPPSASGTPGQRVTISCSGSSSNIGSNYVYWYQQLPGTAPKLLIYRNDQRPSXVPDRFSGS |
| | XSGTSASLAISGLRSXDXADYYCSSYAGNNNLVFGGXTKLTVLGDYXDHDGDYKDHDIDYXDXDXXAA |
| | [SEQ ID NO: 140] |
| C3 | EVQLLESGGGLVQPGGSLRLSCAASGFTFSDHYMDWVRQAPGKGLEWVSGISGNGATIDYADSVKGRFT |
| (4) | ISRDNSKNTLYLQMNSLRAEDTAVYYCARPSITAAGSEDAFDLWGQGTLVTVSSGGGGSGGGGSGGGGS |
| | QSVLTQPPSASGTPGQRVTISCSGSSSNIGSNYVYWYQQLPGTAPKLLIYGNSNRPSGVPDRFSGSKSG |
| | TSASLAISGLRSXDGADYYCQSYDSSLSGWVIGGXTKLTVLGXYXDHDGDYKDXDIDYKDDXXKAA |
| | [SEQ ID NO: 141] |
| MYO | EVQLLESGGGLVQPGGSLRLSCAASGFTFSSYAMSWVRQAPGKGLEWVSGISGSGGSTYYADSVKGRFT |
| M2 | ISRDNSKNTLYLQMNSLRAEDTAVYYCARGVVAGSWGQGTLVTVSSGGGGSGGGGSGGGGSQSVLTQPP |
| (1) | SASGTPGQRVTISCSGSSSXIGNNAVNWYQQLPGTAPKLLIYDNNKRPSXVPDRFSGXXSGTSXSLAIX |
| | GLRSEDEADYYCA [SEQ ID NO: 142] |
| MYO | EVQLLESGGGLVQPGGSLRLSCAASGFTFSNEWMAWVRQAPGKGLEWVSSISSSSSYIYYADSVKGRFT |
| M2 | ISRDNSKNTLYLQMNSLRAEDTAVYYCAGTYHDFWSATYWGQGTLVTVSSGGGGSGGGGSGGGGSQSVL |
| (2) | TQPPSASGTPGQRVTISCSGSSSNIGSNTVNWYQQLPGTAPKLLIYGNSNRPSXVPDRFSGSXSGTSAS |
| | LAISGLRSEDXADYYCAAWDDSLNGWVFGGXTKLTVLGD [SEQ ID NO: 143] |
| LUM | EVQLLESGGGLVQPGGSLRLSCAASGFTFSSNYMSWVRQAPGKGLEWVSAISASGTYTYYTDSVNGRFT |
| | ISRDNSKNTLYLQMNSLRAEDTAVYYCARVNTVGLGTPFDNWGQGTLVTVSSGGGGSGGGGSGGGGSQS |
| | VLTQPPSASGTPGQRVTISCSGSSSNIGSNTVNWYQQLPGTAPKLLIYGNRNRPSGVPDRFSGSXSGTS |
| | ASLAISGLRSEDEADYYCAAWDDSLSGWVFGGXTKLTVLXDYXDHDGDYKDHDIDXXXDDXXAA |
| | [SEQ ID NO: 144] |
| DUSP | EVQLLESGGGLVQPGGSLRLSCAASGFTFSSYGFHWVRQAPGKGLEWVAVISYDGSNKYYADSVKGRFT |
| 9 | ISRDNSKNTLYLQMNSLRAEDTAVYYCARGEFGVYWGQGTLVTVSSGGGGSGGGGSGGGGSQSVLTQPP |
| | SASGTPGQRVTISCSGSSSNIGSNYVYWYQQLPGTAPKLLIYGNRNRPSGVPDRFSGSXSGTSASLAIS |
| | GLRSEDEADYYCSSYAGSNNFEVVFGGXTKLTVLGDYXDHDGDYKDHDIDYKDDDXKAA |
| | [SEQ ID NO: 145] |
| CHX1 | EVQLLESGGGLVQPGGSLRLSCAASGFTFSSYAMSWVRQAPGKGLEWVAVISYDGSNKYYADSVKGRFT |
| 0 (3) | ISRDNSKNTLYLQMNSLRAEDTAVYYCARNYGDSINWFDPWGQGTLVTVSSGGGGSGGGGSGGGGSQSV |
| | LTQPPSASGTPGQRVTISCSGSSSXIRSNIVNWYQQLPGTAPKLLIYGNSNRPSXVPDRFSGXXSGTSX |
| | SLAISGLRSEDXADYYCAXWDDSLN [SEQ ID NO: 146] |
| ATP- | EVQLLESGGGLVQPGGSLRLSCAASGFTFSSYAMHWVRQAPGKGLEWVAVISYDGSKTYHADSVFGRFT |
| 5B | ISRDNSKNTLYLQMNSLRAEDTAVYYCARHLRPYYFDYWGQGTLVTVSSGGGGSGGGGSGGGGSQSVLT |
| (1) | QPPSASGTPGQRVTISCSGSSSXIGSNTVNWYQQLPGTAPKLLIYGNSNRPSXVPDRFSGXXSGTSASL |
| | AISGLRSEDXADYYCSAWDDRLRGRVFGG [SEQ ID NO: 147] |
| ATP- | EVQLLESGGGLVQPGGSLRLSCAASGFTFSSYGMHWVRQAPGKGLEWVSLISSASSYIYHADSVKGRFT |
| 5B | ISRDNSKNTLYLQMNSLRAEDTAVYYCARAGRVCTNGVCHTTFDYWGQGTLVTVSSGGGGSGGGGSGGG |
| (2) | GSQSVLTQPPSASGTPGQRVTISCSGDRSNIGSNTVNWYQQLPGTAPKLLIYGNSNRPSGVPXRFSGSX |
| | SGTSXSLAISGLRSEDEADYYCQSYDSSLSAVVFGGXTKLTVLGDYXXHDXXYKDHDIDYXXDXDXAXA |
| | HXHHHH-SPRXXXXPIVSXXXXXXXXXXXXXXLXKXXXXPTXXXXXXXX [SEQ ID NO: 148] |
| Sox1 | EVQLLESGGGLVQPGGSLRLSCAASGFTFSDFWMSWVRQAPGKGLEWVSSISGGGGTAFYVDSVKGRFT |
| 1a | ISRDNSKNTLYLQMNSLRAEDTALYYCARMTDLESGDAFDIWGQGTLVTVSSGGGGSGGGGSGGGGSQS |
| | VLTQPPSASGTPGQRVTISCSGSSSNIGSNYVNWYQQLPGTAPKLLIYNDNVRPSGVPDRFSGSXSGTS |
| | ASLAISGLRSEDXADYYCQXWGTGVFGGXTKLTVLXDYXDHDGDXXDHDIDXKDXDXKAA |
| | [SEQ ID NO: 149] |
| TBC1 | EVQLLESGGGLVQPGGSLRLSCAASGFTFSSYSMSWVRQAPGKGLEWVAVISYDGSNKYYADSVKGRFT |
| D9 | ISRDNSKNTLYLQMNSLRAEDTAVYYCARDRTRGSTALDIWGQGTLVTVSSGGGGSGGGGSGGGGSQSV |
| (1) | LTQPPSASGTPGQRVTISCSGSSSYIGSNYVYWYQQLPGTAPKLLIYRNNQRPXXVPDRFSGXXSGTSA |
| | SLAISGLRSEDEADYYCAAWDDSLSGWVFGGXTKLTVLGD [SEQ ID NO: 150] |
| UPF3 | EVQLLESGGGLVQPGGSLRLSCAASGFTFSDYYMTINIRQAPGKGLEWVSDISWNGSRTHYADSVKGRF |
| B (1) | TISRDNSKNTLYLQMNSLRAEDTAVYYCSSHLVYWGQGTLVTVSSGGGGSGGGGSGGGGSQSVLTQPPS |
| | ASGTPGQRVTISCTGSSSNIGAGYDVHWYQQLPGTAPKLLIYDNNKRPSXVPDRFSGSXSGTSASLAIX |
| | GLRSEXXADYYCQTYDSSLSGSVVFGGXTKLITVLGDYXDHDXDY [SEQ ID NO: 151] |
| UPF3 | EVQLLESGGGLVQPGGSLRLSCAASGFTFSSYAMSWVRQAPGKGLEWVSYISSSSSYANYADSVKGRFT |
| B (2) | ISRDNSKNTLYLQMNSLRAEDTAVYYCARLGVYSGTYLFAFDIWGQGTLVTVSSGGGGSGGGGSGGGGS |
| | QSVLTQPPSASGTPGQRVTISCTGSSSXIGAGYDVHWYQQLPGTAPKLLIYGNSNRPSXVPDRFSGSXS |
| | GTSASLAISGLRSXDEADYYCQSRDSSLSGWVFGGXTKLTVLGD [SEQ ID NO: 152] |
| Apo- | EVQLLESGGGLVQPGGSLRLSCAASGFTFSDYYMSWVRQAPGKGLEWVSGVSWNGSRTHYADSVKGRFT |
| A4 | ISRDNSKNTLYLQMNSLRAEDTAVYYCARVAYDIDAFDMWGQGTLVTVSSGGGGSGGGGSGGGGSQSVL |
| (2) | TQPPSASGTPGQRVTISCSGSFSNIGSNWYWYQQLPGTAPKLLIYENNKRPSGVPDRFSGSXSGTSASL |
| | AISGLRSEDEADYYCAAWDDSLNGPMFGGXTKLTVLXDYKDHDGDYKDHDIDYKDDXXXXAAHHHHHH- |
| | SPRWXIRPXXSXXTIHXXXXLXXXD [SEQ ID NO: 153] |
| Apo- | EVQLLESGGGLVQPGGSLRLSCAASGFTFSSYSMNWVRQAPGKGLEWVSAITGSGNATFYADSVKGRFT |
| A4 | ISRDNSKNTLYLQMNSLRAEDTAVYYCTTGATTRWGQGTLVTVSSGGGGSGGGGSGGGGSQSVLTQPPS |
| (3) | ASGTPGQRVTISCSGSRSNIGSNHVFWYQQLPGTAPKLLIYENNKRPSGVPDRFSGSXSGTSASLAISG |
| | LRSEDXADYYCAAWDDSLSGWVFGG [SEQ ID NO: 154] |
| TBC1 | EVQLLESGGGLVQPGGSLRLSCAASGFTFSNAWMSWVRQAPGKGLEWVSFISSSSSYIYYADSVKGRFT |
| D9 | ISRDNSKNTLYLQMNSLRAEDTAVYYCARVNLVGCTNGVCNGHDYWGQGTLVTVSSGGGGSGGGGSGGG |
| (2) | GSQSVLTQPPSASGTPGQRVTISCSGSSSXIGSNTVNWYQQLPGTAPKLLIYDNNKRP |
| | [SEQ ID NO: 155] |
| TBC1 | EVQLLESGGGLVQPGGSLRLSCAASGFTFGDYAMSWVRQAPGKGLEWVSAISGSGGSTYYADSVKGRFT |
| D9 | ISRDNSKNTLYLQMNSLRAEDTAVYYCAKGRTMASHWGQGTLVTVSSGGGGSGGGGSGGGGSQSVLTQP |
| (3) | PSASGTPGQRVTISCSGSSSXIGNNHVSWYQQLPGTAPKLLIYGNSNRPSXVPDRFSGSXSGTSASLAI |
| | SGLRSEDXADYYCAAWDNSLKVWMFGG [SEQ ID NO: 156] |
| ORP- | EVQLLESGGGLVQPGGSLRLSCAASGFTFSSNYMSWVRQAPGKGLEWVSYISGNSGYTNYADSVKGRFT |
| 3 (1) | ISRDNSKNTLYLQMNSLRAEDTAVYYCARHAGSYDMYGMDVWGQGTLVTVSSGGGGSGGGGSGGGGSQS |
| | VLTQPPSASGTPGQRVTISCSGSTSXIGSHYVYWYQQLPGTAPKLLIYGNSNRPXXVPDRFSGXXSGTS |
| | XSLAISGLRSEDXADYYCQSYDSRLSGWVFGG [SEQ ID NO: 157] |
| ORP- | EVQLLESGGGLVQPGGSLRLSCAASGFTFSSYAMHWVRQAPGKGLEWVAVISYDGSNKYYADSVKGRFT |
| 3 (2) | ISRDNSKNTLYLQMNSLRAEDTAVYYCARKSSLDVWGQGTLVTVSSGGGGSGGGGSGGGGSQSVLTQPP |
| | SASGTPGQRVTISCSGSSSXIGNNYVSWYQQLPGTAPKLLIYDDNKRPSGVPDRFSGSXSDTSASLAIS |
| | GLRSEDEADYYCAAWDDSLXGRVFGGXTKLTVLG [SEQ ID NO: 158] |
| PKB | EVQLLESGGGLVQPGGSLRLSCAASGFTFGSSYMSWVRQAPGKGLEWVSSISSGGSYTYYADSVKGRFT |
| gamma | ISRDNSKNTLYLQMNSLRAEDTAVYYCARYHASWGRYLDYWGQGTLVTVSSGGGGSGGGGSGGGGSDIQ |
| (1) | MTQSPSSLSASVGDRVTITCRASQSISSYLNWYQQKPGKAPKLLIYAASSLQSGVPSRFSGSGSGTDFT |
| | LTISSLQPEDFATYYCQQVSSWLSTFGQGTKLEIKRLGDYKDHDGDYKDHDIDYKDDDDKAAAHHHHH |
| | H* [SEQ ID NO: 159] |
| PKB | EVQLLESGGGLVQPGGSLRLSCAASGFTFSYSGMGWVRQAPGKGLEWVSYISSGSYYTGYADSVKGRFT |
| gamma | ISRDNSKNTLYLQMNSLRAEDTAVYYCARYSGWRHGFDYWGQGTLVTVSSGGGGSGGGGSGGGGSDIQM |
| (2) | TQSPSSLSASVGDRVTITCRASQSISSYLNWYQQKPGKAPKWYAASSLQSGVPSRFSGSGSGTDFTLTI |
| | SSLQPEDFATYYCQQATVSPSTFGQGTKLEIKRLGDYKDHDGDYKDHDIDYKDDDDKAAAHHHHHH* |
| | [SEQ ID NO: 160] |
| BTK | EVQLLESGGGLVQPGGSLRLSCAASGFTFSSYAMSWVRQAPGKGLEWVSAISGSGGSTYYADSVKGRFT |
| (3) | ISRDNSKNTLYLQMNSLRAEDTAVYYCARGYYGMDYWGQGTLVTVSSGGGGSGGGGSGGGGSDIQMTQS |
| | PSSLSASVGDRVTITCRASQSISSYLNWYQQKPGKAPKLLIYAASSLQSGVPSRFSGSGSGTDFTLTIS |
| | SLQPEDFATYYCQQTWYLPTFGQGTKLEIKRLGDYKDHDGDYKDHDIDYKDDDDKAAAHHHHHH* |
| | [SEQ ID NO: 161] |
| BTK | EVQLLESGGGLVQPGGSLRLSCAASGFTFSSYAMSWVRQAPGKGLEWVSAISGSGGSTYYADSVKGRFT |
| (4) | ISRDNSKNTLYLQMNSLRAEDTAVYYCARGYYGLDYWGQGTLVTVSSGGGGSGGGGSGGGGSDIQMTQS |
| | PSSLSASVGDRVTITCRASQSISSYLNWYQQKPGKAPKLLIYAASSLQSGVPSRFSGSGSGTDFTLTIS |
| | SLQPEDFATYYCQQSGAVPPTFGQGTKLEIKRLGDYKDHDGDYKDHDIDYKDDDDKAAAHHHHHH* |
| | [SEQ ID NO: 162] |
| CDK- | EVQLLESGGGLVQPGGSLRLSCAASGFTFSSYAMSWVRQAPGKGLEWVSGISSYYGYTYYADSVKGRFT |
| 2 (1) | ISRDNSKNTLYLQMNSLRAEDTAVYYCARVYGYYMDYWGQGTLVTVSSGGGGSGGGGSGGGGSDIQMTQ |
| | SPSSLSASVGDRVTITCRASQSISSYLNWYQQKPGKAPKLLIYAASSLQSGVPSRFSGSGSGTDFTLTI |
| | SSLQPEDFATYYCQQSSSLYTFGQGTKLEIKRLGDYKDHDGDYKDHDIDYKDDDDKAAAHHHHHH* |
| | [SEQ ID NO: 163] |
| CDK- | EVQLLESGGGLVQPGGSLRLSCAASGFTFGSSYMGWVRQAPGKGLEWVSSIYGSSSYTSYADSVKGRFT |
| 2 (2) | ISRDNSKNTLYLQMNSLRAEDTAVYYCARWYWSWSSFDYWGQGTLVTVSSGGGGSGGGGSGGGGSDIQM |
| | TQSPSSLSASVGDRVTITCRASQSISSYLNWYQQKPGKAPKLLIYAASSLQSGVPSRFSGSGSGTDFTL |
| | TISSLQPEDFATYYCQQGGWPYTFGQGTKLEIKRLGDYKDHDGDYKDHDIDYKDDDDKAAAHHHHHH* |
| | [SEQ ID NO: 164] |
| GM- | EVQLLESGGGLVQPGGSLRLSCAASGFTFSSYGMSWVRQAPGKGLEWVSYIGSGYYYTSYADSVKGRFT |
| CSF | ISRDNSKNTLYLQMNSLRAEDTAVYYCARGGYFDYWGQGTLVTVSSGGGGSGGGGSGGGGSDIQMTQSP |
| (4) | SSLSASVGDRVTITCRASQSISSYLNWYQQKPGKAPKLLIYAASSLQSGVPSRFSGSGSGTDFTLTISS |
| | LQPEDFATYYCQQGYHLPTFGQGTKLEIKRLGDYKDHDGDYKDHDIDYKDDDDKAAAHHHHHH* |
| | [SEQ ID NO: 165] |
| FASN | EVQLLESGGGLVQPGGSLRLSCAASGFTFGYSGMSWVRQAPGKGLEWVSYIGGGYGSTSYADSVKGRFT |
| (1) | ISRDNSKNTLYLQMNSLRAEDTAVYYCARWSWHHGSYTMDYWGQGTLVTVSSGGGGSGGGGSGGGGSDI |
| | QMTQSPSSLSASVGDRVTITCRASQSISSYLNWYQQKPGKAPKLLIYAASSLQSGVPSRFSGSGSGTDF |
| | TLTISSLQPEDFATYYCQQGYSWFLPTFGQGTKLEIKRLGDYKDHDGDYKDHDIDYKDDDDKAAAHHHH |
| | HH* [SEQ ID NO: 166] |
| FASN | EVQLLESGGGLVQPGGSLRLSCAASGFTFSGSSMSWVRQAPGKGLEWVSSIYYGSGYTYYADSVKGRFT |
| (2) | ISRDNSKNTLYLQMNSLRAEDTAVYYCARGTYLDYWGQGTLVTVSSGGGGSGGGGSGGGGSDIQMTQSP |
| | SSLSASVGDRVTITCRASQSISSYLNWYQQKPGKAPKLLIYAASSLQSGVPSRFSGSGSGTDFTLTISS |
| | LQPEDFATYYCQQHTWWSSYLHTFGQGTKLEIKRLGDYKDHDGDYKDHDIDYKDDDDKAAAHHHHHH* |
| | [SEQ ID NO: 167] |
| GAK | EVQLLESGGGLVQPGGSLRLSCAASGFTFGSSYMSWVRQAPGKGLEWVSSISSSSYGTYYADSVKGRFT |
| (1) | ISRDNSKNTLYLQMNSLRAEDTAVYYCARNPGFDYWGQGTLVTVSSGGGGSGGGGSGGGGSDIQMTQSP |
| | SSLSASVGDRVTITCRASQSISSYLNWYQQKPGKAPKLLIYAASSLQSGVPSRFSGSGSGTDFTLTISS |
| | LQPEDFATYYCQQHYWLPTFGQGTKLEIKRLGDYKDHDGDYKDHDIDYKDDDDKAAAHHHHHH* |
| | [SEQ ID NO: 168] |
| GAK | EVQLLESGGGLVQPGGSLRLSCAASGFTFGSSYMSWVRQAPGKGLEWVSGISSSGYGTYYADSVKGRFT |
| (3) | ISRDNSKNTLYLQMNSLRAEDTAVYYCARGYYHYGYAGFYFDYWGQGTLVTVSSGGGGSGGGGSGGGGS |
| | DIQMTQSPSSLSASVGDRVTITCRASQSISSYLNWYQQKPGKAPKLLIYAASSLQSGVPSRFSGSGSGT |
| | DFTLTISSLQPEDFATYYCQQSAYLFTFGQGTKLEIKRLGDYKDHDGDYKDHDIDYKDDDDKAAAHHHH |
| | HH* [SEQ ID NO: 169] |
| HAD | EVQLLESGGGLVQPGGSLRLSCAASGFTFSSYYMSWVRQAPGKGLEWVSSISSGGYGTGYADSVKGRFT |
| H2 | ISRDNSKNTLYLQMNSLRAEDTAVYYCARSYGWGPLDYWGQGTLVTVSSGGGGSGGGGSGGGGSDIQMT |
| (1) | QSPSSLSASVGDRVTITCRASQSISSYLNWYQQKPGKAPKLLIYAASSLQSGVPSRFSGSGSGTDFTLT |
| | ISSLQPEDFATYYCQQGYNWPYTFGQGTKLEIKRLGDYKDHDGDYKDHDIDYKDDDDKAAAHHHHHH* |
| | SEQ ID NO: 170] |
| HAD | EVQLLESGGGLVQPGGSLRLSCAASGFTFGSSYMSWVRQAPGKGLEWVSSISSYGYYTGYADSVKGRFT |
| H2 | ISRDNSKNTLYLQMNSLRAEDTAVYYCARSYGSWYFDYWGQGTLVTVSSGGGGSGGGGSGGGGSDIQMT |
| (3) | QSPSSLSASVGDRVTITCRASQSISSYLNWYQQKPGKAPKLLIYAASSLQSGVPSRFSGSGSGTDFTLT |
| | ISSLCIPEDFATYYCQQGFVGPSTFGQGTKLEIKRLGDYKDHDGDYKDHDIDYKDDDDKAAAHHHHHH* |
| | [SEQ ID NO: 171] |
| IL-6 | EVQLLESGGGLVQPGGSLRLSCAASGFTFGYSSMGWVRQAPGKGLEWVSGISSYGYGTYYADSVKGRFT |
| (7) | ISRDNSKNTLYLQMNSLRAEDTAVYYCARYHSGWGMDYWGQGTLVTVSSGGGGSGGGGSGGGGSDIQMT |
| | QSPSSLSASVGDRVTITCRASQSISSYLNWYQQKPGKAPKLLIYAASSLQSGVPSRFSGSGSGTDFTLT |
| | ISSLQPEDFATYYCQQSFAYLHTFGQGTKLEIKRLGDYKDHDGDYKDHDIDYKDDDDKAAAHHHHHH* |
| | [SEQ ID NO: 172] |
| Keratin | EVQLLESGGGLVQPGGSLRLSCAASGFTFGYYYMYWVRQAPGKGLEWVSSIGSSGSSTSYADSVKGRFT |
| 19 | ISRDNSKNTLYLQMNSLRAEDTAVYYCARGHAFFDYWGQGTLVWSSGGGGSGGGGSGGGGSDIQMTQSP |
| (1) | SSLSASVGDRVTITCRASQSISSYLNWYQQKPGKAPKLLIYAASSLQSGVPSRFSGSGSGTDFTLTISS |
| | LQPEDFATYYCQQVWYWPPTFGQGTKLEXKRLXDYKDHDGDYKXHDIDYKDDDDKAA |
| | [SEQ ID NO: 173] |
| Keratin | EVQLLESGGGLVQPGGSLRLSCAASGFTFYGSSMSWVRQAPGKGLEWVSYIGSDSSYTSYADSVKGRFT |
| 19 | ISRDNSKNTLYLQMNSLRAEDTAVYYCARSYWSVFDYWGQGTLVTVSSGGGGSGGGGSGGGGSDIQMTQ |
| (2) | SPSSLSASVGDRVTITCRASQSISSYLNWYQQKPGKAPKLLIYAASSLQSGVPSRFSGSGSGTDFTLTI |
| | SSLQPEDFATYYCQQSYWSWLPTFGQGXKLEIKRLXDYKDHDGDYKDHDIDYKDDDDKAA |
| | [SEQ ID NO: 174] |
| KSYK | EVQLLESGGGLVQPGGSLRLSCAASGFTFSSYAMSWVRQAPGKGLEWVSGISSGYYYTYYADSVKGRFT |
| (1) | ISRDNSKNTLYLQMNSLRAEDTAVYYCARVGWYWNGLDYWGQGTLVTVSSGGGGSGGGGSGGGGSDIQM |
| | TQSPSSLSASVGDRVTITCRASQSISSYLNWYQQKPGKAPKLLIYAASSLQSGVPSRFSGSGSGTDFTL |
| | TISSLCIPEDFATYYCQQSSVLPTFGQGTKLEIKRLGDYKDHDGDYKDHDIDYKDDDDKAAAHHHHHH* |
| | [SEQ ID NO: 175] |
| KSYK | EVQLLESGGGLVQPGGSLRLSCAASGFTFSSYAMSWVRQAPGKGLEWVSAISGSGGSTYYADSVKGRFT |
| (2) | ISRDNSKNTLYLQMNSLRAEDTAVYYCARGYYGLDYWGQGTLVTVSSGGGGSGGGGSGGGGSDIQMTQS |
| | PSSLSASVGDRVTITCRASQSISSYLNWYQQKPGKAPKLLIYAASSLQSGVPSRFSGSGSGTDFTLTIS |
| | SLCIPEDFATYYCQQSGAVPPTFGQGTKLEIKRLGDYKDHDGDYKDHDIDYKDDDDKAAAHHHHHH* |
| | [SEQ ID NO: 176] |
| MAT | EVQLLESGGGLVQPGGSLRLSCAASGFTFYGYSMYWVRQAPGKGLEWVSYIGSYSGSTSYADSVKGRFT |
| K (2) | ISRDNSKNTLYLQMNSLRAEDTAVYYCARYYHYYHTWLDYWGQGTLVTVSSGGGGSGGGGSGGGGSDIQ |
| | MTQSPSSLSASVGDRVTITCRASQSISSYLNWYQQKPGKAPKLLIYAASSLQSGVPSRFSGSGSGTDFI |
| | LTISSLQPEDFATYYCQQGFYPFTFGQGTKLEIKRLGDYKDHDGDYKDHDIDYKDDDDKAAAHHHHHH* |
| | [SEQ ID NO: 177] |
| MAT | EVQLLESGGGLVQPGGSLRLSCAASGFTFSSYAMSWVRQAPGKGLEWVSAISGSGGSTYYADSVKGRFT |
| K (3) | ISRDNSKNTLYLQMNSLRAEDTAVYYCARYPFYDYSVVGGRWPSYGIDYWGQGTLVTVSSGGGGSGGGG |
| | SGGGGSDIQMTQSPSSLSASVGDRVTITCRASQSISSYLNWYQQKPGKAPKLLIYAASSLQSGVPSRFS |
| | GSGSGTDFTLTISSLQPEDFATYYCQQWNSGVWLHTFGQGTKLEIKRLGDYKDHDGDYKDHDIDYKDDD |
| | DKAAAHHHHHH* [SEQ ID NO: 178] |
| MAP | EVQLLESGGGLVQPGGSLRLSCAASGFTFSSSYMYWVRQAPGKGLEWVSSISGGGYGTYYADSVKGRFT |
| K1 | ISRDNSKNTLYLQMNSLRAEDTAVYYCARAYPYVGSGIDYWGQGTLVTVSSGGGGSGGGGSGGGGSDIQ |
| (1) | MTQSPSSLSASVGDRVTITCRASQSISSYLNWYQQKPGKAPKLLIYAASSLQSGVPSRFSGSGSGTDFI |
| | LTISSLQPEDFATYYCQQGYSLPTFGQGTKLEIKRLGDYKDHDGDYKDHDIDYKDDDDKAAAHHHHHH* |
| | [SEQ ID NO: 179] |
| MAP | EVQLLESGGGLVQPGGSLRLSCAASGFTFYYSYMGWVRQAPGKGLEWVSSISGSSYGTSYADSVKGRFT |
| K1 | ISRDNSKNTLYLQMNSLRAEDTAVYYCARGTGSVIDYWGQGTLVTVSSGGGGSGGGGSGGGGSDIQMTQ |
| (2) | SPSSLSASVGDRVTITCRASQSISSYLNWYQQKPGKAPKLLIYAASSLQSGVPSRFSGSGSGTDFTLTI |
| | SSLQPEDFATYYCQQSYSTPYTFGQGTKLEIKRLGDYKDHDGDYKDHDIDYKDDDDKAAAHHHHHH* |
| | [SEQ ID NO: 180] |
| MAP | EVQLLESGGGLVQPGGSLRLSCAASGFTFYGSSMSWVRQAPGKGLEWVSGISGYGYYTSYADSVKGRFT |
| K8 | ISRDNSKNTLYLQMNSLRAEDTAVYYCARYSASGFYFDYWGQGTLVTVSSGGGGSGGGGSGGGGSDIQM |
| (1) | TQSPSSLSASVGDRVTITCRASQSISSYLNWYQQKPGKAPKLLIYAASSLQSGVPSRFSGSGSGTDFTL |
| | TISSLQPEDFATYYCQQSYVYPLTFGQGTKLEIKRLGDYKDHDGDYKDHDIDYKDDDDKAAAHHHHHH* |
| | [SEQ ID NO: 181] |
| MAP | EVQLLESGGGLVQPGGSLRLSCAASGFTFSSYSMGWVRQAPGKGLEWVSGISSYGYYTYYADSVKGRFT |
| K8 | ISRDNSKNTLYLQMNSLRAEDTAVYYCARHYTTGYYIDYWGQGTLVTVSSGGGGSGGGGSGGGGSDIQM |
| (2) | TQSPSSLSASVGDRVTITCRASQSISSYLNWYQQKPGKAPKLLIYAASSLQSGVPSRFSGSGSGTDFTL |
| | TISSLQPEDFATYYCQQGFNVPYTFGQGTKLEIKRLGDYKDHDGDYKDHDIDYKDDDDKAAAHHHHHH* |
| | [SEQ ID NO: 182] |
| MAP | EVQLLESGGGLVQPGGSLRLSCAASGFTFSGSGMYWVRQAPGKGLEWVSYISGSGSYTDYADSVKGRFT |
| K8 | ISRDNSKNTLYLQMNSLRAEDTAVYYCARSGSFDYWGQGTLVTVSSGGGGSGGGGSGGGGSDIQMTQSP |
| (3) | SSLSASVGDRVTITCRASQSISSYLNWYQQKPGKAPKLLIYAASSLQSGVPSRFSGSGSGTDFTLTISS |
| | LQPEDFATYYCQQVSSSLYTFGQGTKLEIKRLGDYKDHDGDYKDHDIDYKDDDDKAAAHHHHHH* |
| | [SEQ ID NO: 183] |
| Osteo- | EVQLLESGGGLVQPGGSLRLSCAASGFTFSSYAMSWVRQAPGKGLEWVSAISGSGGSTYYADSVKGRFT |
| pontin | ISRDNSKNTLYLQMNSLRAEDTAVYYCARAYSWFDYWGQGTLVTVSSGGGGSGGGGSGGGGSDIQMTQS |
| (1) | PSSLSASVGDRVTITCRASQSISSYLNWYQQKPGKAPKLLIYAASSLQSGVPSRFSGSGSGTDFTLTIS |
| | SLQPEDFATYYCQQVAGYYHYPFTFGQGTKLEIKRLGDYKDHDGDYKDHDIDYKDDDDKAAAHHHHHH* |
| | [SEQ ID NO: 184] |
| Osteo- | EVQLLESGGGLVQPGGSLRLSCAASGFTFSSYAMSWVRQAPGKGLEWVSAISGSGGSTYYADSVKGRFT |
| pontin | ISRDNSKNTLYLQMNSLRAEDTAVYYCARYHYNYYMDYWGQGTLVTVSSGGGGSGGGGSGGGGSDIQMT |
| (2) | QSPSSLSASVGDRVTITCRASQSISSYLNWYQQKPGKAPKLLIYAASSLQSGVPSRFSGSGSGTDFTLT |
| | ISSLQPEDFATYYCQQYSYLLTFGQGTKLEIKRLGDYKDHDGDYKDHDIDYKDDDDKAAAHHHHHH* |
| | [SEQ ID NO: 185] |
| P85A | EVQLLESGGGLVQPGGSLRLSCAASGFTFYSSSMSWVRQAPGKGLEWVSGISSSYSYTYYADSVKGRFT |
| (1) | ISRDNSKNTLYLQMNSLRAEDTAVYYCARYSSYGSFDYWGQGTLVTVSSGGGGSGGGGSGGGGSDIQMT |
| | QSPSSLSASVGDRVTITCRASQSISSYLNWYQQKPGKAPKLLIYAASSLQSGVPSRFSGSGSGTDFTLT |
| | ISSLQPEDFATYYCQQSSAFPSTFGQGTKLEIKRLGDYKDHDGDYKDHDIDYKDDDDKAAAHHHHHH* |
| | [SEQ ID NO: 186] |
| P85A | EVQLLESGGGLVQPGGSLRLSCAASGFTFSSYSMGWVRQAPGKGLEWVSYIGYSSGSTYYADSVKGRFT |
| (2) | ISRDNSKNTLYLQMNSLRAEDTAVYYCARDRYSYFDYWGQGTLVTVSSGGGGSGGGGSGGGGSDIQMTQ |
| | SPSSLSASVGDRVTITCRASQSISSYLNWYQQKPGKAPKWYAASSLQSGVPSRFSGSGSGTDFTLTISS |
| | LQPEDFATYYCQQWSYGPLTFGQGTKLEIKRLGDYKDHDGDYKDHDIDYKDDDDKAAAHHHHHH* |
| | [SEQ ID NO: 187] |
| PTK6 | EVQLLESGGGLVQPGGSLRLSCAASGFTFSSYAMSWVRQAPGKGLEWVSAISGSGGSTYYADSVKGRFT |
| | ISRDNSKNTLYLQMNSLRAEDTAVYYCARGGHGLDYWGQGTLVTVSSGGGGSGGGGSGGGGSDIQMTQS |
| | PSSLSASVGDRVTITCRASQSISSYLNWYQQKPGKAPKLLIYAASSLQSGVPSRFSGSGSGTDFTLTIS |
| | SLQPEDFATYYCQQGSDVPFTFGQGTKLEIKRLGDYKDHDGDYKDHDIDYKDDDDKAAAHHHHHH* |
| | [SEQ ID NO: 188] |
| PTPN | EVQLLESGGGLVQPGGSLRLSCAASGFTFGYSSMSWVRQAPGKGLEWVSSISYSGSGTGYADSVKGRFT |
| 1 (1) | ISRDNSKNTLYLQMNSLRAEDTAVYYCARGWYPHPGHWYIDYWGQGTLVTVSSGGGGSGGGGSGGGGSD |
| | IQMTQSPSSLSASVGDRVTITCRASQSISSYLNWYQQKPGKAPKLLIYAASSLQSGVPSRFSGSGSGTD |
| | FTLTISSLQPEDFATYYCQQHFSLPTFGQGTKLEIKRLGDYKDHDGDYKDHDIDYKDDDDKAAAHHHHH |
| | H* [SEQ ID NO: 189] |
| PTPN | EVQLLESGGGLVQPGGSLRLSCAASGFTFSYYSMSWVRQAPGKGLEWVSSISSSGGGTSYADSVKGRFT |
| 1 (3) | ISRDNSKNTLYLQMNSLRAEDTAVYYCARWFSSAFDYWGQGTLVTVSSGGGGSGGGGSGGGGSDIQMTQ |
| | SPSSLSASVGDRVTITCRASQSISSYLNWYQQKPGKAPKLLIYAASSLQSGVPSRFSGSGSGTDFTLTI |
| | SSLQPEDFATYYCQQGVPPYTFGQGTKLEIKRLGDYKDHDGDYKDHDIDYKDDDDKAAAHHHHHH* |
| | [SEQ ID NO: 190] |
| RPS6 | EVQLLESGGGLVQPGGSLRLSCAASGFTFSSYAMSWVRQAPGKGLEWVSAISGSGGSTYYADSVKGRFT |
| KA2 | ISRDNSKNTLYLQMNSLRAEDTAVYYCARRYSGYFDYWGQGTLVTVSSGGGGSGGGGSGGGGSDIQMTQ |
| (1) | SPSSLSASVGDRVTITCRASQSISSYLNWYQQKPGKAPKLLIYAASSLQSGVPSRFSGSGSGTDFTLTI |
| | SSLQPEDFATYYCQQNWWGLPTFGQGTKLEIKRLGDYKDHDGDYKDHDIDYKDDDDKAAAHHHHHH* |
| | [SEQ ID NO: 191] |
| RPS6 | EVQLLESGGGLVQPGGSLRLSCAASGFTFYGSYMYWVRQAPGKGLEWVSGISPYSSSTYYADSVKGRFT |
| KA2 | ISRDNSKNTLYLQMNSLRAEDTAVYYCARGFPFIDYWGQGTLVTVSSGGGGSGGGGSGGGGSDIQMTQS |
| (2) | PSSLSASVGDRVTITCRASQSISSYLNWYQQKPGKAPKLLIYAASSLQSGVPSRFSGSGSGTDFTLTIS |
| | SLQPEDFATYYCQQNGVGLLTFGQGTKLEIKRLGDYKDHDGDYKDHDIDYKDDDDKAAAHHHHHH* |
| | [SEQ ID NO: 192] |
| STAP | EVQLLESGGGLVQPGGSLRLSCAASGFTFYGGSMYWVRQAPGKGLEWVSSISSGGSYTYYADSVKGRFT |
| 2 (1) | ISRDNSKNTLYLQMNSLRAEDTAVYYCARVGYDTMDYWGQGTLVTVSSGGGGSGGGGSGGGGSDIQMTQ |
| | SPSSLSASVGDRVTITCRASQSISSYLNWYQQKPGKAPKLLIYAASSLQSGVPSRFSGSGSGTDFTLTI |
| | SSLQPEDFATYYCQQRWYWWYLFTFGQGTKLEIKRLGDYKDHDGDYKDHDIDYKDDDDKAAAHHHHHH* |
| | [SEQ ID NO: 193] |
| STAP | EVQLLESGGGLVQPGGSLRLSCAASGFTFYYGGMSWVRQAPGKGLEWVSSIYYSSGSTSYADSVKGRFT |
| 2 (4) | ISRDNSKNTLYLQMNSLRAEDTAVYYCARHGWDDNGFDYWGQGTLVTVSSGGGGSGGGGSGGGGSDIQM |
| | TQSPSSLSASVGDRVTITCRASQSISSYLNWYQQKPGKAPKLLIYAASSLQSGVPSRFSGSGSGTDFTL |
| | TISSLQPEDFATYYCQQVYSYLFTFGQGTKLEIKRLGDYKDHDGDYKDHDIDYKDDDDKAAAHHHHHH* |
| | [SEQ ID NO: 194] |
| STAT | EVQLLESGGGLVQPGGSLRLSCAASGFTFGYYGMSWVRQAPGKGLEWVSGIYGSYYSTYYADSVKGRFT |
| 1 (1) | ISRDNSKNTLYLQMNSLRAEDTAVYYCARHSWDYYFDYWGQGTLVTVSSGGGGSGGGGSGGGGSDIQMT |
| | QSPSSLSASVGDRVTITCRASQSISSYLNWYQQKPGKAPKLLIYAASSLQSGVPSRFSGSGSGTDFTLT |
| | ISSLQPEDFATYYCQQYHYGYGSPYTFGQGTKLEIKRLGDYKDHDGDYKDHDIDYKDDDDKAAAHHHHH |
| | H* [SEQ ID NO: 195] |
| STAT | EVQLLESGGGLVQPGGSLRLSCAASGFTFSYSSMYWVRQAPGKGLEWVSSISSYGHSTYYADSVKGRFT |
| 1 (2) | ISRDNSKNTLYLQMNSLRAEDTAVYYCARSWGYYHYLDYWGQGTLVTVSSGGGGSGGGGSGGGGSDIQM |
| | TQSPSSLSASVGDRVTITCRASQSISSYLNWYQQKPGKAPKLLIYAASSLQSGVPSRFSGSGSGTDFTL |
| | TISSLQPEDFATYYCQQTWHPYPSTFGQGTKLEIKRLGDYKDHDGDYKDHDIDYKDDDDKAAAHHHHH |
| | H* [SEQ ID NO: 196] |
| TENS | EVQLLESGGGLVQPGGSLRLSCAASGFTFSGYSMSWVRQAPGKGLEWVSSISSGYYSTYYADSVKGRFT |
| 4 | ISRDNSKNTLYLQMNSLRAEDTAVYYCARVYWGSPWFNPAMDYWGQGTLVTVSSGGGGSGGGGSGGGGS |
| | DIQMTQSPSSLSASVGDRVTITCRASQSISSYLNWYQQKPGKAPKLLIYAASSLQSGVPSRFSGSGSGT |
| | DFTLTISSLQPEDFATYYCQQWYYWVPPTFGQGTKLEIKRLGDYKDHDGDYKDHDIDYKDDDDKAAAHH |
| | HHHH* [SEQ ID NO: 197] |
| TNFR | EVQLLESGGGLVQPGGSLRLSCAASGFTFSSFAMHWVRQAPGKGLEWVSAISGSGGSTYYADSVKGRFT |
| SF14 | ISRDNSKNTLYLQMNSLRAEDTAVYYCASRSTLYYYYGMDVWGQGTLVTVSSGGGGSGGGGSGGGGSQS |
| (1) | VLTQPPSASGTPGQRVTISCSGSTSNIGNSHVYWYQQLPGTAPKLLIYGNSNRPSXVPDRFSGSXSGTS |
| | ASLAISGLRSEDEADYYCSSXAGSNNLVFGGXTKLTVLGEQKLISXXDLSGSAA |
| | [SEQ ID NO: 198] |
| TNFR | EVQLLESGGGLVQPGGSLRLSCAASGFTFSSYAMSWVRQAPGKGLEWVSAISGSGGSTYYADSVKGRFT |
| SF14 | ISRDNSKNTLYLQMNSLRAEDTAVYYCARSPYYGMDVWGQGTLVTVSSGGGGSGGGGSGGGGSQSVLTQ |
| (2) | PPSASGTPGQRVTISCTGSSSNIGAGYDVHWYQQLPGTAPKLLIYRNDQRPSGVPDRFSGSKSGTSASL |
| | AISGLRSEDEADYYCSSYGGRDNVVFGGXTKLTVLXEQKLISXXXLSGSAA |
| | [SEQ ID NO: 199] |
| TNFR | EVQLLESGGGLVQPGGSLRLSCAASGFTFSDYYMSWIRQAPGKGLEWVSGLSGSAGRTHYADSVRGRFT |
| SF3 | ISRDNSKNTLYLQMNSLRAEDTAMYYCASSLFDYWGQGTLVTVSSGGGGSGGGGSGGGGSQSVLTQPPS |
| (1) | ASGTPGQRVTISCSGSSSNIGSNYVYWYQQLPGTAPKLLIYSNNQRPSGVPDRFSGSKSGTSASLAISG |
| | LRSEDXADYYCAAWDDSLNAVVFGGXTKLTVLGEQKLISEXDLSGSAA [SEQ ID NO: 200] |
| TNFR | EVQLLESGGGLVQPGGSLRLSCAASGFTFSDYYMNWVRQAPGKGLEWVSGINWNSDDIDYVDSVKGRFT |
| SF3 | ISRDNSKNTLYLQMNSLRAEDTAMYYCAIDSRYSSGWSFEYWGQGTLVTVSSGGGGSGGGGSGGGGSQS |
| (2) | VLTQPPSASGTPGQRVTISCSGSTSNIGNSHVYWYQQLPGTAPKLLIYSNNQRPSGVPDRFSGSKSGTS |
| | ASLAISGLRSEDEADYYCQSYDSSLSGVVFGGXTKLTVLGEQKLISXXXLSGSAA |
| | [SEQ ID NO: 201] |
| UBC9 | EVQLLESGGGLVQPGGSLRLSCAASGFTFGYGSMSWVRQAPGKGLEWVSSISYYGSSTGYADSVKGRFT |
| (1) | ISRDNSKNTLYLQMNSLRAEDTAVYYCARGVVWLDYWGQGTLVTVSSGGGGSGGGGSGGGGSDIQMTQS |
| | PSSLSASVGDRVTITCRASQSISSYLNWYQQKPGKAPKLLIYAASSLQSGVPSRFSGSGSGTDFTLTIS |
| | SLQPEDFATYYCQQGPYPPTFGQGTKLEIKRLGDYKDHDGDYKDHDIDYKDDDDKAAAHHHHHH* |
| | [SEQ ID NO: 202] |
| UBC9 | EVQLLESGGGLVQPGGSLRLSCAASGFTFYGSSMSWVRQAPGKGLEWVSGISYSSSYTSYADSVKGRFT |
| (2) | ISRDNSKNTLYLQMNSLRAEDTAVYYCARATSYWFTYFGVIDYWGQGTLVTVSSGGGGSGGGGSGGGGS |
| | DIQMTQSPSSLSASVGDRVTITCRASQSISSYLNWYQQKPGKAPKLLIYAASSLQSGVPSRFSGSGSGT |
| | DFTLTISSLQPEDFATYYCQQSWSPHTFGQGTKLEIKRLGDYKDHDGDYKDHDIDYKDDDDKAAAHHHH |
| | HH* [SEQ ID NO: 203] |
| UBE2 | EVQLLESGGGLVQPGGSLRLSCAASGFTFGYYSMSWVRQAPGKGLEWVSAISGSGGSTYYADSVKGRFT |
| C (1) | ISRDNSKNTLYLQMNSLRAEDTAVYYCARGGFWYGGYMDYWGQGTLVTVSSGGGGSGGGGSGGGGSDIQ |
| | MTQSPSSLSASVGDRVTITCRASQSISSYLNWYQQKPGKAPKLLIYAASSLQSGVPSRFSGSGSGTDFT |
| | LTISSLQPEDFATYYCQQSSGPHPFTFGQGTKLEIKRLGDYKDHDGDYKDHDIDYKDDDDKAAAHHHHH |
| | H* [SEQ ID NO: 204] |
| UBE2 | EVQLLESGGGLVQPGGSLRLSCAASGFTFSSYSMSWVRQAPGKGLEWVSSISGYSYGTYYADSVKGRFT |
| C (2) | ISRDNSKNTLYLQMNSLRAEDTAVYYCARWHHPYYFDYWGQGTLVTVSSGGGGSGGGGSGGGGSDIQMT |
| | QSPSSLSASVGDRVTITCRASQSISSYLNWYQQKPGKAPKLLIYAASSLQSGVPSRFSGSGSGTDFTLT |
| | ISSLQPEDFATYYCQQGSVLSTFGQGTKLEIKRLGDYKDHDGDYKDHDIDYKDDDDKAAAHHHHHH* |
| | [SEQ ID NO: 205] |
| UCHL | EVQLLESGGGLVQPGGSLRLSCAASGFTFSSYAMSWVRQAPGKGLEWVSAISGSGGSTYYADSVKGRFT |
| 5 | ISRDNSKNTLYLQMNSLRAEDTAVYYCARGWSLDYWGQGTLVTVSSGGGGSGGGGSGGGGSDIQMTQSP |
| | SSLSASVGDRVTITCRASQSISSYLNWYQQKPGKAPKLLIYAASSLQSGVPSRFSGSGSGTDFTLTISS |
| | LQPEDFATYYCQQVHFLPTFGQGTKLEIKRLGDYKDHDGDYKDHDIDYKDDDDKAAAHHHHHH* |
| | [SEQ ID NO: 206] |
| Her2/ | EVQLVESGGGLVQPGGSLRLSCAASGFNIKDTYIHWVRQAPGKGLEWVARIYPTNGYTRYADSVKGRFT |
| Erb | ISADTSKNTAYLQMNSLRAEDTAVYYCSRWGGDGFYAMDYWGQGTLVTVSSGGGGSGGGGSGGGGSDIQ |
| B2 (4) | MTQSPSSLSASVGDRVTITCRASQDVNTAVAWYQQKPGKAPKLLIYSASFLYSGVPSRFSGSRSGTDFT |
| | LTISSLQPEDFATYYCQQHYTTPPTFGQGTKVEIKRLGDYKDHDGDYKDHDIDYKDDDDKAAAHHHHH |
| | H* [SEQ ID NO: 207] |
| EGFR | QVQLKQSGPGLVQPSQSLSITCTVSGFSLTNYGVHWVRQSPGKGLEWLGVIWSGGNTDYNTPFTSRLSI |
| | NKDNSKSQVFFKMNSLQSNDTAIYYCARALTYYDYEFAYWGQGTLVTVSSGGGGSGGGGSGGGGSDILL |
| | TQSPVILSVSPGERVSFSCRASQSIGTNIHWYQQRTNGSPRLLIKYASESISGIPSRFSGSGSGTDFTL |
| | SINSVESEDIADYYCQQNNNWPTTFGAGTKLELKLGDYKDHDGDYKDHDIDYKDDDDKAAAHHHHHH* |
| | [SEQ ID NO: 208] |
| CHP1 | EVQLLESGGGLVQPGGSLRLSCAASGFTFYYYGMSWVRQAPGKGLEWVSGIGYGYGTYADSVKGRFTIS |
| (1) | RDNSKNTLYLQMNSLRAEDTAVYYCARDSYSSPYYSLDYWGQGTLVTVSSGGGGSGGGGSGGGGSDIQM |
| | TQSPSSLSASVGDRVTITCRASQSISSYLNWYQQKPGKAPKLLIYAASSLQSGVPSRFSGSGSGTDFTL |
| | TISSLQPEDFATYYCQQSYSTPYTFGQGTKLEIKRLGDYKDHDGDYKDHDIDYKDDDDKAAAHHHHHH* |
| | [SEQ ID NO: 209] |
| CHP1 | EVQLLESGGGLVQPGGSLRLSCAASGFTFYSYSMGWVRQAPGKGLEWVSSIGGSGYYTYYADSVKGRFT |
| (2) | ISRDNSKNTLYLQMNSLRAEDTAVYYCARNYNYYYGSYIDYWGQGTLVTVSSGGGGSGGGGSGGGGSDI |
| | QMTQSPSSLSASVGDRVTITCRASQSISSYLNWYQQKPGKAPKLLIYAASSLQSGVPSRFSGSGSGTDF |
| | TLTISSLQPEDFATYYCQQSFYPHTFGQGTKLEIKRLGDYKDHDGDYKDHDIDYKDDDDKAAAHHHHH |
| | H* [SEQ ID NO: 210] |
| AGA | EVQLLESGGGLVQPGGSLRLSCAASGFTFGSYSMHWVRQAPGKGLEWVSSISSYSYSTYYADSVKGRFT |
| P-2 | ISRDNSKNTLYLQMNSLRAEDTAVYYCARGGAYYTNPFDYWGQGTLVTVSSGGGGSGGGGSGGGGSDIQ |
| (1) | MTQSPSSLSASVGDRVTITCRASQSISSYLNWYQQKPGKAPKLLIYAASSLQSGVPSRFSGSGSGTDFT |
| | LTISSLQPEDFATYYCQQPGFYSLPTFGQGTKLEIKRLGDYKDHDGDYKDHDIDYKDDDDKAAAHHHHH |
| | H* [SEQ ID NO: 211] |
| AGA | EVQLLESGGGLVQPGGSLRLSCAASGFTFGGYSMYWVRQAPGKGLEWVSYISSGSSSTYYADSVKGRFT |
| P-2 | ISRDNSKNTLYLQMNSLRAEDTAVYYCARGGGWYDYDFFDYWGQGTLVTVSSGGGGSGGGGSGGGGSDI |
| (3) | QMTQSPSSLSASVGDRVTITCRASQSISSYLNWYQQKPGKAPKLLIYAASSLQSGVPSRFSGSGSGTDF |
| | TLTISSLQPEDFATYYCQQSYSTPYTFGQGTKLEIKRLGDYKDHDGDYKDHDIDYKDDDDKAAAHHHHH |
| | H* [SEQ ID NO: 212] |
| MAP | EVQLLESGGGLVQPGGSLRLSCAASGFTFSYGDMSWVRQAPGKGLEWVSGISSGGSSTYYADSVKGRFT |
| K9 | ISRDNSKNTLYLQMNSLRAEDTAVYYCARGYGYAWYFDYWGQGTLVTVSSGGGGSGGGGSGGGGSDIQM |
| (1) | TQSPSSLSASVGDRVTITCRASQSISSYLNWYQQKPGKAPKLLIYAASSLQSGVPSRFSGSGSGTDFTL |
| | TISSLQPEDFATYYCQQWWHPYTFGQGTKLEIKRLGDYKDHDGDYKDHDIDYKDDDDKAAAHHHHHH* |
| | [SEQ ID NO: 213] |
| MAP | EVQLLESGGGLVQPGGSLRLSCAASGFTFGYGGMSWVRQAPGKGLEWVSSIYGSSSSTYYADSVKGRFT |
| K9 | ISRDNSKNTLYLQMNSLRAEDTAVYYCARHWRSVYFDYWGQGTLVTVSSGGGGSGGGGSGGGGSDIQMT |
| (2) | QSPSSLSASVGDRVTITCRASQSISSYLNWYQQKPGKAPKLLIYAASSLQSGVPSRFSGSGSGTDFTLT |
| | ISSLQPEDFATYYCQQGWGSPLTFGQGTKLEIKRLGDYKDHDGDYKDHDIDYKDDDDKAAAHHHHHH* |
| | [SEQ ID NO: 214] |
| MAP | EVQLLESGGGLVQPGGSLRLSCAASGFTFSGSYMSWVRQAPGKGLEWVSSIYGYSSYTYYADSVKGRFT |
| K9 | ISRDNSKNTLYLQMNSLRAEDTAVYYCARGSYLDYWGQGTLVTVSSGGGGSGGGGSGGGGSDIQMTQSP |
| (5) | SSLSASVGDRVTITCRASQSISSYLNWYQQKPGKAPKLLIYAASSLQSGVPSRFSGSGSGTDFTLTISS |
| | LQPEDFATYYCQQYWYPYTFGQGTKLEIKRLGDYKDHDGDYKDHDIDYKDDDDKAAAHHHHHH* |
| | [SEQ ID NO: 215] |
| PAK- | EVQLLESGGGLVQPGGSLRLSCAASGFTFSGYSMSWVRQAPGKGLEWVSSISSSYSSTYYADSVKGRFT |
| 7 (1) | ISRDNSKNTLYLQMNSLRAEDTAVYYCARGSFGFDYWGQGTLVTVSSGGGGSGGGGSGGGGSDIQMTQS |
| | PSSLSASVGDRVTITCRASQSISSYLNWYQQKPGKAPKLLIYAASSLQSGVPSRFSGSGSGTDFTLTIS |
| | SLQPEDFATYYCQQYYYGVLXTFGQGTKLEIKRLGDYKDHDGDYKDHDIDYKDDDDKAAAHHHHHH* |
| | [SEQ ID NO: 216] |
| PAK- | EVQLLESGGGLVQPGGSLRLSCAASGFTFYYSSMSWVRQAPGKGLEWVSGISGGYSSTYYADSVKGRFT |
| 7 (2) | ISRDNSKNTLYLQMNSLRAEDTAVYYCARGFGVMDYWGQGTLVTVSSGGGGSGGGGSGGGGSDIQMTQS |
| | PSSLSASVGDRVTITCRASQSISSYLNWYQQKPGKAPKLLIYAASSLQSGVPSRFSGSGSGTDFTLTIS |
| | SLQPEDFATYYCQQSYSTPYTFGQGTKLEIKRLGDYKDHDGDYKDHDIDYKDDDDKAAAHHHHHH* |
| | [SEQ ID NO: 217] |
| GEM | EVQLLESGGGLVQPGGSLRLSCAASGFTFYYSYMYWVRQAPGKGLEWVSAISGSGGSTYYADSVKGRFT |
| (1) | ISRDNSKNTLYLQMNSLRAEDTAVYYCARFYYYGFNGSFDYWGQGTLVTVSSGGGGSGGGGSGGGGSDI |
| | QMTQSPSSLSASVGDRVTITCRASQSISSYLNWYQQKPGKAPKLLIYAASSLQSGVPSRFSGSGSGTDF |
| | TLTISSLQPEDFATYYCQQSYSTPYTFGQGTKLEIKRLGDYKDHDGDYKDHDIDYKDDDDKAAAHHHHH |
| | H* [SEQ ID NO: 218] |
| GEM | EVQLLESGGGLVQPGGSLRLSCAASGFTFYGSYMGWVRQAPGKGLEWVSGISSYSYSTYYADSVKGRFT |
| (2) | ISRDNSKNTLYLQMNSLRAEDTAVYYCARYSPFHWYFDYWGQGTLVTVSSGGGGSGGGGSGGGGSDIQM |
| | TQSPSSLSASVGDRVTITCRASQSISSYLNWYQQKPGKAPKLLIYAASSLQSGVPSRFSGSGSGTDFTL |
| | TISSLQPEDFATYYCQQSFRDPPHTFGQGTKLEIKRLGDYKDHDGDYKDHDIDYKDDDDKAAAHHHHH |
| | H* [SEQ ID NO: 219] |
| GNAI | EVQLLESGGGLVQPGGSLRLSCAASGFTFSSYAMSWVRQAPGKGLEWVSYISGGYGYTSYADSVKGRFT |
| 3 (1) | ISRDNSKNTLYLQMNSLRAEDTAVYYCARVVYDSSYFDYWGQGTLVTVSSGGGGSGGGGSGGGGSDIQM |
| | TQSPSSLSASVGDRVTITCRASQSISSYLNWYQQKPGKAPKLLIYAASSLQSGVPSRFSGSGSGTDFTL |
| | TISSLQPEDFATYYCQQAYYGFPSTFGQGTKLEIKRLGDYKDHDGDYKDHDIDYKDDDDKAAAHHHHH |
| | H* [SEQ ID NO: 220] |
| GNAI | EVQLLESGGGLVQPGGSLRLSCAASGFTFSSSSMSWVRQAPGKGLEWVSGISGYGGGTGYADSVKGRFT |
| 3 (2) | ISRDNSKNTLYLQMNSLRAEDTAVYYCARSSYFVYFDYWGQGTLVTVSSGGGGSGGGGSGGGGSDIQMT |
| | QSPSSLSASVGDRVTITCRASQSISSYLNWYQQKPGKAPKWYAASSLQSGVPSRFSGSGSGTDFTLTIS |
| | SLQPEDFATYYCQQPYGYPYTFGQGTKLEIKRLGDYKDHDGDYKDHDIDYKDDDDKAAAHHHHHH* |
| | [SEQ ID NO: 221] |
| MAP | EVQLLESGGGLVQPGGSLRLSCAASGFTFSSYAMSWVRQAPGKGLEWVSAISGSGGSTYYADSVKGRFT |
| 2K6 | ISRDNSKNTLYLQMNSLRAEDTAVYYCARSHTVYFDYWGQGTLVTVSSGGGGSGGGGSGGGGSDIQMTQ |
| (3) | SPSSLSASVGDRVTITCRASQSISSYLNWYQQKPGKAPKWYAASSLQSGVPSRFSGSGSGTDFTLTISS |
| | LQPEDFATYYCQQSYSTPYTFGQGTKLEIKRLGDYKDHDGDYKDHDIDYKDDDDKAAAHHHHHH* |
| | [SEQ ID NO: 222] |
| MAP | EVQLLESGGGLVQPGGSLRLSCAASGFTFSSYAMSWVRQAPGKGLEWVSGISSYGGSTSYADSVKGRFT |
| 2K6 | ISRDNSKNTLYLQMNSLRAEDTAVYYCARFGHAFPAFDYWGQGTLVTVSSGGGGSGGGGSGGGGSDIQM |
| (4) | TQSPSSLSASVGDRVTITCRASQSISSYLNWYQQKPGKAPKLLIYAASSLQSGVPSRFSGSGSGTDFTL |
| | TISSLQPEDFATYYCQQSYSTPYTFGQGTKLEIKRLGDYKDHDGDYKDHDIDYKDDDDKAAAHHHHHH* |
| | [SEQ ID NO: 223] |
| MAP | EVQLLESGGGLVQPGGSLRLSCAASGFTFGYYSMSWVRQAPGKGLEWVSSISSSSSYTYYADSVKGRFT |
| 2K2 | ISRDNSKNTLYLQMNSLRAEDTAVYYCARHYSSFDYWGQGTLVTVSSGGGGSGGGGSGGGGSDIQMTQS |
| (1) | PSSLSASVGDRVTITCRASQSISSYLNWYQQKPGKAPKLLIYAASSLQSGVPSRFSGSGSGTDFTLTIS |
| | SLQPEDFATYYCQQSYWYPFTFGQGTKLEIKRLGDYKDHDGDYKDHDIDYKDDDDKAAAHHHHHH* |
| | [SEQ ID NO: 224] |
| MAP | EVQLLESGGGLVQPGGSLRLSCAASGFTFYYSSMSWVRQAPGKGLEWVSSIYGGGGSTSYADSVKGRFT |
| 2K2 | ISRDNSKNTLYLQMNSLRAEDTAVYYCARGPGHVIDYWGQGTLVTVSSGGGGSGGGGSGGGGSDIQMTQ |
| (2) | SPSSLSASVGDRVTITCRASQSISSYLNWYQQKPGKAPKLLIYAASSLQSGVPSRFSGSGSGTDFTLTI |
| | SSLQPEDFATYYCQQSYYVPFTFGQGTKLEIKRLGDYKDHDGDYKDHDIDYKDDDDKAAAHHHHHH* |
| | [SEQ ID NO: 225] |
| KRAS | EVQLLESGGGLVQPGGSLRLSCAASGFTFSGSYMYWVRQAPGKGLEWVSSIGSSYGYTYYADSVKGRFT |
| | ISRDNSKNTLYLQMNSLRAEDTAVYYCARYGYFSFDYWGQGTLVTVSSGGGGSGGGGSGGGGSDIQMTQ |
| | SPSSLSASVGDRVTITCRASQSISSYLNWYQQKPGKAPKLLIYAASSLQSGVPSRFSGSGSGTDFTLTI |
| | SSLQPEDFATYYCQQDHYLSTFGQGTKLEIKRLGDYKDHDGDYKDHDIDYKDDDDKAAAHHHHHH* |
| | [SEQ ID NO: 226] |
| PTPRO | EVQLLESGGGLVQPGGSLRLSCAASGFTFSYSGMGWVRQAPGKGLEWVSYISSYGYSTYYADSVKGRFT |
| (1) | ISRDNSKNTLYLQMNSLRAEDTAVYYCARSVSGGVIDYWGQGTLVTVSSGGGGSGGGGSGGGGSDIQMT |
| | QSPSSLSASVGDRVTITCRASQSIXXYLNWYQQKPGKAPKLLIYAAXSLQSGVPSRFSGSGSGTDFTLT |
| | ISSLQPEDFATYYCQQWVHYPYTFGQGTKLEIKRLGDYKDHDGDYKDHDIDYKDDDDKAAAHHHHHH* |
| | [SEQ ID NO: 227] |
| PTPRO | EVQLLESGGGLVQPGGSLRLSCAASGFTFSGYYXSWVRQAPGKGLEWVSSISGGSYSKSYADSVKGRFT |
| (4) | ISRDNSKNTLYLQMNSLRAEDTAVYYCARYSYYFDYWGQGTLVTVSSGGGGSGGGGSGGGGSDIQMTQS |
| | PSSLSASVGDRVTITCRASQSISSYLNWYQQKPGKAPKLLIYAASSLQSGVPSRFSGSGSGTDFTLTIS |
| | SLQPEDFATYYCQQYAAYGLLTFGQGTKLEIKRLGDYKDHDGDYKDHDIDYKDDDDKAAAHHHHHH* |
| | [SEQ ID NO: 228] |
| PAR- | EVQLLESGGGLVQPGGSLRLSCAASGFTFSSYAMSWVRQAPGKGLEWVSAISGSGGSTYYADSVKGRFT |
| 6B | ISRDNSKNTLYLQMNSLRAEDTAVYYCARWNVWGHWGGPYSGVGLDYWGQGTLVTVSSGGGGSGGGGSG |
| (1) | GGGSDIQMTQSPSSLSASVGDRVTITCRASQSISSYLNWYQQKPGKAPKLLIYAASSLQSGVPSRFSGS |
| | GSGTDFTLTISSLQPEDFATYYCQQPYYPFTEGQGTKLEIKRLGDYKDHDGDYKDHDIDYKDDDDKAAA |
| | HHHHHH*[SEQ ID NO: 229] |
| PAR- | EVQLLES GGGLVQPGGSLRLSCAASGFTFSYYYMYWVRQAPGKGLEWVSYIYSYYYGTYYADSVKGRF |
| 6B | TISRDNSKNTLYLQMNSLRAEDTAVYYCARYAYYLDYWGQGTLVTVSSGGGGSGGGGSGGGGSDIQMTQ |
| (2) | SPSSLSASVGDRVTITCRASQSISSYLNWYQQKPGKAPKLLIYAASSLQSGVPSRFSGSGSGTDFTLTI |
| | SSLQPEDFATYYCQQHWSYGLYTFGQGTKLEIKRLGDYKDHDGDYKDHDIDYKDDDDKAAAHHHHHH* |
| | [SEQ ID NO: 230] |
| PRD- | EVQLLESGGGLVQPGGSLRLSCAASGFTFGSYGMSWVRQAPGKGLEWVSSIYSGYSYTYYADSVKGRFT |
| 14 | ISRDNSKNTLYLQMNSLRAEDTAVYYCARHGPYRGPGSMDYWGQGTLVTVSSGGGGSGGGGSGGGGSDI |
| (1) | QMTQSPSSLSASVGDRVTITCRASQSISSYLNWYQQKPGKAPKLLIYAASSLQSGVPSRFSGSGSGTDF |
| | TLTISSLQPEDFATYYCQQSWWLLTFGQGTKLEIKRLGDYKDHDGDYKDHDIDYKDDDDKAAAHHHHH |
| | H* [SEQ ID NO: 231] |
| PRD- | EVQLLESGGGLVQPGGSLRLSCAASGFTFYSGGMSWVRQAPGKGLEWVSSISGGYYYTYYADSVKGRFT |
| 14 | ISRDNSKNTLYLQMNSLRAEDTAVYYCARYVYGVGIDYWGQGTLVTVSSGGGGSGGGGSGGGGSDIQMT |
| (2) | QSPSSLSASVGDRVTITCRASQSISSYLNWYQQKPGKAPKLLIYAASSLQSGVPSRFSGSGSGTDFTLT |
| | ISSLQPEDFATYYCQQGYWLFTFGQGTKLEIKRLGDYKDHDGDYKDHDIDYKDDDDKAAAHHHHHH* |
| | [SEQ ID NO: 232] |
| PRD- | EVQLLESGGGLVQPGGSLRLSCAASGFTFSGYSMYWVRQAPGKGLEWVSSIYGYYGGTSYADSVKGRFT |
| 14 | ISRDNSKNTLYLQMNSLRAEDTAVYYCARGHPWFYMDYWGQGTLVTVSSGGGGSGGGGSGGGGSDIQMT |
| (3) | QSPSSLSASVGDRVTITCRASQSISSYLNWYQQKPGKAPKLLIYAASSLQSGVPSRFSGSGSGTDFTLT |
| | ISSLQPEDFATYYCQQSYWLYTFGQGTKLEIKRLGDYKDHDGDYKDHDIDYKDDDDKAAAHHHHHH* |
| | [SEQ ID NO: 233] |
| TOPB | EVQLLESGGGLVQPGGSLRLSCAASGFTFSGSSMSWVRQAPGKGLEWVSSISSGGSSTGYADSVKGRFT |
| P-1 | ISRDNSKNTLYLQMNSLRAEDTAVYYCARFSWGHWSSFFDYWGQGTLVTVSSGGGGSGGGGSGGGGSDI |
| (1) | QMTQSPSSLSASVGDRVTITCRASQSISSYLNWYQQKPGKAPKLLIYAASSLQSGVPSRFSGSGSGTDF |
| | TLTISSLQPEDFATYYCQQVYDLLTFGQGTKLEIKRLGDYKDHDGDYKDHDIDYKDDDDKAAAHHHHH |
| | H* [SEQ ID NO: 234] |
| TOPB | EVQLLESGGGLVQPGGSLRLSCAASGFTFGSSSMSWVRQAPGKGLEWVSSISYGSSSTSYADSVKGRFT |
| P-1 | ISRDNSKNTLYLQMNSLRAEDTAVYYCARGGYGFDYWGQGTLVTVSSGGGGSGGGGSGGGGSDIQMTQS |
| (2) | PSSLSASVGDRVTITCRASXXLNWYQQKPGKAPKLLIYXXXXSLQSGVPSRFSGSGSGTDFTLTISSLQ |
| | PEDFATYYCQQGXXXGXXTFGQGTKLEIKRLGDYKDHDGDYKDHDIDYKDDDDKAAAHHHHHH* |
| | [SEQ ID NO: 235] |
| USP- | EVQLLESGGGLVQPGGSLRLSCAASGFTFGSSSMYWVRQAPGKGLEWVSSISYYGYSTYYADSVKGRFT |
| 7 (1) | ISRDNSKNTLYLQMNSLRAEDTAVYYCARGSGIDYWGQGTLVTVSSGGGGSGGGGSGGGGSDIQMTQSP |
| | SSLSASVGDRVTITCRASQSISSYLNWYQQKPGKAPKLLIYAASSLQSGVPSRFSGSGSGTDFTLTISS |
| | LQPEDFATYYCQQWSVYGLYTFGQGTKLEIKRLGDYKDHDGDYKDHDIDYKDDDDKAAAHHHHHH* |
| | [SEQ ID NO: 236] |
| USP- | EVQLLESGGGLVQPGGSLRLSCAASGFTFSSYAMSWVRQAPGKGLEWVSAISGSGGSTYYADSVKGRFT |
| 7 (4) | ISRDNSKNTLYLQMNSLRAEDTAVYYCARVYSYPGPSSWGYFSSIDYWGQGTLVTVSSGGGGSGGGGSG |
| | GGGSDIQMTQSPSSLSASVGDRVTITCRASQSISSYLNWYQQKPGKAPKLLIYAASSLQSGVPSRFSGS |
| | GSGTDFTLTISSLQPEDFATYYCQQSYGYPHTFGQGTKLEIKRLGDYKDHDGDYKDHDIDYKDDDDKAA |
| | AHHHHHH* [SEQ ID NO: 237] |
| PARP- | EVQLLESGGGLVQPGGSLRLSCAASGFTFSGSGMGWVRQAPGKGLEWVSYIGYYSSGTYYADSVKGRFT |
| 1 | ISRDNSKNTLYLQMNSLRAEDTAVYYCARHHSFGYLDYWGQGTLVTVSSGGGGSGGGGSGGGGSDIQMT |
| | QSPSSLSASVGDRVTITCRASQSISSYLNWYQQKPGKAPKLLIYAASSLQSGVPSRFSGSGSGTDFTLT |
| | ISSLQPEDFATYYCQQGVHWSLHTFGQGTKLEIKRLGDYKDHDGDYKDHDIDYKDDDDKAAAHHHHHH* |
| | [SEQ ID NO: 238] |
| GRIP- | EVQLLESGGGLVQPGGSLRLSCAASGFTFSSYAMSWVRQAPGKGLEWVSAISGSGGSTYYADSVKGRFT |
| 2 (1) | ISRDNSKNTLYLQMNSLRAEDTAVYYCARIHFYGLDYWGQGTLVTVSSGGGGSGGGGSGGGGSDIQMTQ |
| | SPSSLSASVGDRVTITCRASQSISSYLNWYQQKPGKAPKLLIYAASSLQSGVPSRFSGSGSGTDFTLTI |
| | SSLQPEDFATYYCQQSYSTPYTFGQGTKLEIKRLGDYKDHDGDYKDHDIDYKDDDDKAAAHHHHHH* |
| | [SEQ ID NO: 239] |
| GRIP- | EVQLLESGGGLVQPGGSLRLSCAASGFTFSSYAMSWVRQAPGKGLEWVSAISGSGGSTYYADSVKGRFT |
| 2 (7) | ISRDNSKNTLYLQMNSLRAEDTAVYYCARGSYMDYWGQGTLVTVSSGGGGSGGGGSGGGGSDIQMTQSP |
| | SSLSASVGDRVTITCRASQSISSYLNWYQQKPGKAPKLLIYAASSLQSGVPSRFSGSGSGTDFTLTISS |
| | LQPEDFATYYCQQSYGPPTFGQGTKLEIKRLGDYKDHDGDYKDHDIDYKDDDDKAAAHHHHHH* |
| | [SEQ ID NO: 240] |
| GRIP- | EVQLLESGGGLVQPGGSLRLSCAASGFTFSSYAMSWVRQAPGKGLEWVSAISGSGGSTYYADSVKGRFT |
| 2 (8) | ISRDNSKNTLYLQMNSLRAEDTAVYYCARHSGPFFDYWGQGTLVTVSSGGGGSGGGGSGGGGSDIQMTQ |
| | SPSSLSASVGDRVTITCRASQSISSYLNWYQQKPGKAPKLLIYAASSLQSGVPSRFSGSGSGTDFTLTI |
| | SSLQPEDFATYYCQQGYSLHTFGQGTKLEIKRLGDYKDHDGDYKDHDIDYKDDDDKAAAHHHHHH* |
| | [SEQ ID NO: 241] |
| MAD | EVQLLESGGGLVQPGGSLRLSCAASGFTFGSSYMGWVRQAPGKGLEWVSGISGGGYGTYYADSVKGRFT |
| 2L1 | ISRDNSKNTLYLQMNSLRAEDTAVYYCARAPGGHYYGYFYFDYWGQGTLVTVSSGGGGSGGGGSGGGGS |
| (1) | DIQMTQSPSSLSASVGDRVTITCRASQSISSYLNWYQQKPGKAPKLLIYAASSLQSGVPSRFSGSGSGT |
| | DFTLTISSLQPEDFATYYCQQXXXXAHTFGQGTKLEIKRLGDYKDHDGDYKDHDIDYKDDDDKAAAHHH |
| | HHH* [SEQ ID NO: 242] |
| MAD | EVQLLESGGGLVQPGGSLRLSCAASGFTFYYSSMYWVRQAPGKGLEWVSGISSGGSGTYYADSVKGRFT |
| 2L1 | ISRDNSKNTLYLQMNSLRAEDTAVYYCARSFSYSSYLDYWGQGTLVTVSSGGGGSGGGGSGGGGSDIQM |
| (2) | TQSPSSLSASVGDRVTITCRASQSISSYLNWYQQKPGKAPKWYAASSLQSGVPSRFSGSGSGTDFILTI |
| | SSLQPEDFATYYCQQGGXXPTFGQGTKLEIKRLGDYKDHDGDYKDHDIDYKDDDDKAAAHHHHHH* |
| | [SEQ ID NO: 243] |
| HsHe | EVQLLESGGGLVQPGGSLRLSCAASGFTFSGSSMYWVRQAPGKGLEWVSGIGSYGGYTYYADSVKGRFT |
| c1 | ISRDNSKNTLYLQMNSLRAEDTAVYYCARDGTAVGSYFYFDYWGQGTLVTVSSGGGGSGGGGSGGGGSD |
| (2) | IQMTQSPSSLSASVGDRVTITCRASQSISSYLNWYQQKPGKAPKLLIYAASSLQSGVPSRFSGSGSGTD |
| | FTLTISSLQPEDFATYYCQQYYYYPHTFGQGTKLEIKRLGDYKDHDGDYKDHDIDYKDDDDKAAAHHHH |
| | HH* [SEQ ID NO: 244] |
| HsHe | EVQLLESGGGLVQPGGSLRLSCAASGFTFSSYAMSWVRQAPGKGLEWVSGIGSGGYYTSYADSVKGRFT |
| c1 | ISRDNSKNTLYLQMNSLRAEDTAVYYCARFYFVASPGGNLDYWGQGTLVTVSSGGGGSGGGGSGGGGSD |
| (3) | IQMTQSPSSLSASVGDRVTITCRASQSISSYLNWYQQKPGKAPKLLIYAASSLQSGVPSRFSGSGSGTD |
| | FTLTISSLQPEDFATYYCQQYSSPPTFGQGTKLEIKRLGDYKDHDGDYKDHDIDYKDDDDKAAAHHHHH |
| | H* [SEQ ID NO: 245] |
| Spindly | EVQLLESGGGLVQPGGSLRLSCAASGFTFSSYYMSWVRQAPGKGLEWVSSIDYSSYYTGYADSVKGRFT |
| (1) | ISRDNSKNTLYLQMNSLRAEDTAVYYCARGSYFDYWGQGTLVTVSSGGGGSGGGGSGGGGSDIQMTQSP |
| | SSLSASVGDRVTITCRASQSISSYLNWYQQKPGKAPKLLIYAASSLQSGVPSRFSGSGSGTDFTLTISS |
| | LQPEDFATYYCQQGSPLYTFGQGTKLEIKRLGDYKDHDGDYKDHDIDYKDDDDKAAAHHHHHH* |
| | [SEQ ID NO: 246] |
| Spindly | EVQLLESGGGLVQPGGSLRLSCAASGFTFYSYYMGWVRQAPGKGLEWVSSISYSGSGTYYADSVKGRFT |
| (2) | ISRDNSKNTLYLQMNSLRAEDTAVYYCARASYGTSYYYGYTIDYWGQGTLVTVSSGGGGSGGGGSGGGG |
| | SDIQMTQSPSSLSASVGDRVTITCRASQSISSYLNWYQQKPGKAPKLLIYAASSLQSGVPSRFSGSGSG |
| | TDFTLTISSLQPEDFATYYCQQSYAGPSTFGQGTKLEIKRLGDYKDHDGDYKDHDIDYKDDDDKAAAHH |
| | HHHH* [SEQ ID NO: 247] |
| PTPR | EVQLLESGGGLVQPGGSLRLSCAASGFTFSYSGMSWVRQAPGKGLEWVSSIGGSSSYTYYADSVKGRFT |
| K (1) | ISRDNSKNTLYLQMNSLRAEDTAVYYCARYSWGYYDAIDYWGQGTLVTVSSGGGGSGGGGSGGGGSDIQ |
| | MTQSPSSLSASVGDRVTITCRASQSISSYLNWYQQKPGKAPKLLIYAASSLQSGVPSRFSGSGSGTDFT |
| | LTISSLQPEDFATYYCQQSWWGHALYTFGQGTKLEIKRLGDYKDHDGDYKDHDIDYKDDDDKAAAHHHH |
| | HH* [SEQ ID NO: 248] |
| PTPR | EVQLLESGGGLVQPGGSLRLSCAASGFTFYYSSMSWVRQAPGKGLEWVSSIGYGSGYTYYADSVKGRFT |
| K (7) | ISRDNSKNTLYLQMNSLRAEDTAVYYCARVGASGSFDYWGQGTLVTVSSGGGGSGGGGSGGGGSDIQMT |
| | QSPSSLSASVGDRVTITCRASQSISSYLNWYQQKPGKAPKLLIYAASSLQSGVPSRFSGSGSGTDFTLT |
| | ISSLQPEDFATYYCQQYHYYSLYTFGQGTKLEIKRLGDYKDHDGDYKDHDIDYKDDDDKAAAHHHHHH* |
| | [SEQ ID NO: 249] |
| PTPR | EVQLLESGGGLVQPGGSLRLSCAASGFTFSSSSMGWVRQAPGKGLEWVSYISGYSYYTYYADSVKGRFT |
| K (8) | ISRDNSKNTLYLQMNSLRAEDTAVYYCARSSGTYGYYIDYWGQGTLVTVSSGGGGSGGGGSGGGGSDIQ |
| | MTQSPSSLSASVGDRVTITCRASQSISSYLNWYQQKPGKAPKLLIYAASSLQSGVPSRFSGSGSGTDFT |
| | LTISSLQPEDFATYYCQQGSYFPSTFGQGTKLEIKRLGDYKDHDGDYKDHDIDYKDDDDKAAAHHHHH |
| | H* [SEQ ID NO: 250] |
| PTPR | EVQLLESGGGLVQPGGSLRLSCAASGFTFGGYSMSWVRQAPGKGLEWVSGISYGYGSTYYADSVKGRFT |
| T (1) | ISRDNSKNTLYLQMNSLRAEDTAVYYCARGGPSYSMDYWGQGTLVTVSSGGGGSGGGGSGGGGSDIQMT |
| | QSPSSLSASVGDRVTITCRASQSISSYLNWYQQKPGKAPKLLIYAASSLQSGVPSRFSGSGSGTDFTLT |
| | ISSLQPEDFATYYCQQSAYLSTFGQGTKLEIKRLGDYKDHDGDYKDHDIDYKDDDDKAAAHHHHHH* |
| | [SEQ ID NO: 251] |
| PTPR | EVQLLESGGGLVQPGGSLRLSCAASGFTFSSSGMYWVRQAPGKGLEWVSGIYSYGSYTSYADSVKGRFT |
| 1(2) | ISRDNSKNTLYLQMNSLRAEDTAVYYCARVNYFGIDYWGQGTLVTVSSGGGGSGGGGSGGGGSDIQMTQ |
| | SPSSLSASVGDRVTITCRASQSISSYLNWYQQKPGKAPKLLIYAASSLQSGVPSRFSGSGSGTDFTLTI |
| | SSLQPEDFATYYCQQSWHSPPTFGQGTKLEIKRLGDYKDHDGDYKDHDIDYKDDDDKAAAHHHHHH* |
| | [SEQ ID NO: 252] |
| PGA | EVQLLESGGGLVQPGGSLRLSCAASGFTFYSSYMYWVRQAPGKGLEWVSGISSYGGSTSYADSVKGRFT |
| M-5 | ISRDNSKNTLYLQMNSLRAEDTAVYYCARYGPGSVFDYWGQGTLVTVSSGGGGSGGGGSGGGGSDIQMT |
| (1) | QSPSSLSASVGDRVTITCRASQSISSYLNWYQQKPGKAPKLLIYAASSLQSGVPSRFSGSGSGTDFILT |
| | ISSLQPEDFATYYCQQVYVAYSYPYTFGQGTKLEIKRLGDYKDHDGDYKDHDIDYKDDDDKAAAHHHHH |
| | H* [SEQ ID NO: 253] |
| PGA | EVQLLESGGGLVQPGGSLRLSCAASGFTFSGSYMYWVRQAPGKGLEWVSGISSSGDYTSYADSVKGRFT |
| M-5 | ISRDNSKNTLYLQMNSLRAEDTAVYYCARVGYHSFFDYWGQGTLVTVSSGGGGSGGGGSGGGGSDIQMT |
| (2) | QSPSSLSASVGDRVTITCRASQSISSYLNWYQQKPGKAPKLLIYAASSLQSGVPSRFSGSGSGTDFTLT |
| | ISSLQPEDFATYYCQQYYWYLHTFGQGTKLEIKRLGDYKDHDGDYKDHDIDYKDDDDKAAAHHHHHH* |
| | [SEQ ID NO: 254] |
| PTPR | EVQLLESGGGLVQPGGSLRLSCAASGFTFSSYAMSWVRQAPGKGLEWVSYISSSGGYTYYADSVKGRFT |
| J (1) | ISRDNSKNTLYLQMNSLRAEDTAVYYCARWAPWPYGYSMDYWGQGTLVTVSSGGGGSGGGGSGGGGSDI |
| | QMTQSPSSLSASVGDRVTITCRASQSISSYLNWYQQKPGKAPKLLIYAASSLQSGVPSRFSGSGSGTDF |
| | TLTISSLQPEDFATYYCQQSSYSLSTFGQGTKLEIKRLGDYKDHDGDYKDHDIDYKDDDDKAAAHHHHH |
| | H* [SEQ ID NO: 255] |
| PTPR | EVQLLESGGGLVQPGGSLRLSCAASGFTFSSGGMSWVRQAPGKGLEWVSSIYYSSSSTSYADSVKGRFT |
| J (7) | ISRDNSKNTLYLQMNSLRAEDTAVYYCARGYGYYMDYWGQGTLVTVSSGGGGSGGGGSGGGGSDIQMTQ |
| | SPSSLSASVGDRVTITCRASQSISSYLNWYQQKPGKAPKLLIYAASSLQSGVPSRFSGSGSGTDFTLTI |
| | SSLQEDFATYYCQQGSYAYLSTFGQGTKLEIKRLGDYKDHDGDYKDHDIDYKDDDDKAAAHHHHHH* |
| | [SEQ ID NO: 256] |
| PTPR | EVQLLESGGGLVQPGGSLRLSCAASGFTFSSGGMYWVRQAPGKGLEWVSSIYGSSSSTYYADSVKGRFT |
| J (8) | ISRDNSKNTLYLQMNSLRAEDTAVYYCARGPYASGYYYLDYWGQGTLVTVSSGGGGSGGGGSGGGGSDI |
| | QMTQSPSSLSASVGDRVTITCRASQSISSYLNWYQQKPGKAPKLLIYAASSLQSGVPSRFSGSGSGTDF |
| | TLTISSLQPEDFATYYCQQVNYSSSYPFTFGQGTKLEIKRLGDYKDHDGDYKDHDIDYKDDDDKAAAHH |
| | HHHH* [SEQ ID NO: 257] |
| ANM | EVQLLESGGGLVQPGGSLRLSCAASGFTFSSYAMSWVRQAPGKGLEWVSGISGGSYYTGYADSVKGRFT |
| 5 (1) | ISRDNSKNTLYLQMNSLRAEDTAVYYCARYTSAYYHAYFDYWGQGTLVTVSSGGGGSGGGGSGGGGSDI |
| | QMTQSPSSLSASVGDRVTITCRASQSISSYLNWYQQKPGKAPKLLIYAASSLQSGVPSRFSGSGSGTDF |
| | TLTISSLQPEDFATYYCQQSYSTPYTFGQGTKLEIKRLGDYXDHDGDYKDHDIDXKDDDDKAA |
| | [SEQ ID NO: 258] |
| ANM | EVQLLESGGGLVQPGGSLRLSCAASGFTFSYSSMGWVRQAPGKGLEWVSSIGGYSGYTYYADSVKGRFT |
| 5 (2) | ISRDNSKNTLYLQMNSLRAEDTAVYYCARGSWYLDYWGQGTLVTVSSGGGGSGGGGSGGGGSDIQMTQS |
| | PSSLSASVGDRVTITCRASQSISSYLNWYQQKPGKAPKWYAASSLQSGVPSRFSGSGSGTDFTLTISSL |
| | CIPEDFATYYCQQYGGYPPHTFGQGTKLEIKRLGDYKDHDGDYKDHDIDYKDDDDKAA |
| | [SEQ ID NO: 259] |
| APLF | EVQLLESGGGLVQPGGSLRLSCAASGFTFSSYAMSWVRQAPGKGLEWVSAISGSGGSTYYADSVKGRFT |
| (1) | ISRDNSKNTLYLQMNSLRAEDTAVYYCARGYYDLDYWGQGTLVTVSSGGGGSGGGGSGGGGSDIQMTQS |
| | PSSLSASVGDRVTITCRASQSISSYLNWYQQKPGKAPKLLIYAASSLQSGVPSRFSGSGSGTDFTLTIS |
| | SLQPEDFATYYCQQSYSTPYTFGQGXKLEIKRLGDYKDHDGDYXDHDIDXXDDDXXAA |
| | [SEQ ID NO: 260] |
| APLF | EVQLLESGGGLVQPGGSLRLSCAASGFTFSSYAMSWVRQAPGKGLEWVSAISGSGGSTYYADSVKGRFT |
| (2) | ISRDNSKNTLYLQMNSLRAEDTAVYYCARGYYDMDYWGQGTLVTVSSGGGGSGGGGSGGGGSDIQMTQS |
| | PSSLSASVGDRVTITCRASQSISSYLNWYQQKPGKAPKWYAASSLQSGVPSRFSGSGSGTDFTLTISSL |
| | QPEDFATYYCQQSYSTPYTFGQGXKLEIKRLGXYKDHDGDYKDHDIDYXDDDDKAA |
| | [SEQ ID NO: 261] |
| ARH | EVQLLESGGGLVQPGGSLRLSCAASGFTFGSYSMSWVRQAPGKGLEWVSSISYGGSYTSYADSVKGRFT |
| GC-1 | ISRDNSKNTLYLQMNSLRAEDTAVYYCARVYGGYYYGYIDYWGQGTLVTVSSGGGGSGGGGSGGGGSDI |
| (1) | QMTQSPSSLSASVGDRVTITCRASQSISSYLNWYQQKPGKAPKLLIYAASSLQSGVPSRFSGSGSGTDF |
| | TLTISSLQPEDFATYYCQQWYADFPYTFGQGTKLEIKRLXDYKDHDGDYKDHDIDYXDXDDKAA |
| | [SEQ ID NO: 262] |
| BIRC | EVQLLESGGGLVQPGGSLRLSCAASGFTFYSSSMSWVRQAPGKGLEWVSSISSYSGYTSYADSVKGRFT |
| 2 (1) | ISRDNSKNTLYLQMNSLRAEDTAVYYCARDYWGSLDYWGQGTLVTVSSGGGGSGGGGSGGGGSDIQMTQ |
| | SPSSLSASVGDRVTITCRASQSISSYLNWYQQKPGKAPKLLIYAASSLQSGVPSRFSGSGSGTDFTLTI |
| | SSLQPEDFATYYCQQHGYSYPLTFGQGTKLEIKRLGDYKDHDGDYXDHDIDXKDDXXKAA |
| | [SEQ ID NO: 263] |
| BIRC | EVQLLESGGGLVQPGGSLRLSCAASGFTFGGYGMGWVRQAPGKGLEWVSSISSYSSYTYYADSVKGRFT |
| 2 (2) | ISRDNSKNTLYLQMNSLRAEDTAVYYCARTYYDYFDYWGQGTLVTVSSGGGGSGGGGSGGGGSDIQMTQ |
| | SPSSLSASVGDRVTITCRASQSISSYLNWYQQKPGKAPKLLIYAASSLQSGVPSRFSGSGSGTDFTLTI |
| | SSLQPEDFATYYCQQGYYYPYTFGQGTKLEIKRLGDYKDHDGDYKDHDIDYXDDDDKAA |
| | [SEQ ID NO: 264] |
| DCNL | EVQLLESGGGLVQPGGSLRLSCAASGFTFPYYYMSWVRQAPGKGLEWVSSIGSYSGGTSYADSVKGRFT |
| 1 (1) | ISRDNSKNTLYLQMNSLRAEDTAVYYCARVYRVYFYSGFDYWGQGTLVTVSSGGGGSGGGGSGGGGSDI |
| | QMTQSPSSLSASVGDRVTITCRASQSISSYLNWYQQKPGKAPKLLIYAASSLQSGVPSRFSGSGSGTDF |
| | TLTISSLQPEDFATYYCQQSYSTPYTFGQGTKLEIKRLXDYKDHDGDYKDHDIDYXDXDDXAXAHHHHH |
| | H-SPRXXSXSPXXESYYARXXXVVXQXXXXENXXXXXXXXXXXHPPFXXXXXXXX |
| | [SEQ ID NO: 265] |
| DCNL | EVQLLESGGGLVQPGGSLRLSCAASGFTFYYSYMSWVRQAPGKGLEWVSYISPGSGYTYYADSVKGRFT |
| 1 (2) | ISRDNSKNTLYLQMNSLRAEDTAVYYCARFYWGYSSYLDYWGQGTLVTVSSGGGGSGGGGSGGGGSDIQ |
| | MTQSPSSLSASVGDRVTITCRASQSISSYLNWYQQKPGKAPKLLIYAASSLQSGVPSRFSGSGSGTDFT |
| | LTISSLQPEDFATYYCQQVYYRGLPTFGQGXKLEIKRXGXYKDHDGDXKDHDXDXXMXMXXRP |
| | [SEQ ID NO: 266] |
| DLG1- | EVQLLESGGGLVQPGGSLRLSCAASGFTFSSYYMYWVRQAPGKGLEWVSGISSSGGSTYYADSVKGRFT |
| 1 (1) | ISRDNSKNTLYLQMNSLRAEDTAVYYCARNRDYSSYDGGYMDYWGQGTLVTVSSGGGGSGGGGSGGGGS |
| | DIQMTQSPSSLSASVGDRVTITCRASQSISSYLNWYQQKPGKAPKLLIYAASSLQSGVPSRFSGSGSGT |
| | DFTLTISSLQPEXFATYYCQQGYSYYPLTFGQGTKLEIKRLXDYKDHDGDYXDHDXDXXMTMXRRP |
| | [SEQ ID NO: 267] |
| DLG1- | EVQLLESGGGLVQPGGSLRLSCAASGFTFSSYSMYWVRQAPGKGLEWVSSISYGGYYTYYADSVKGRFT |
| 1 (2) | ISRDNSKNTLYLQMNSLRAEDTAVYYCARNGAFGYPYLDYWGQGTLVTVSSGGGGSGGGGSGGGGSDIQ |
| | MTQSPSSLSASVGDRVTITCRASQSISSYLNWYQQKPGKAPKLLIYAASSLQSGVPSRFSGSGSGTDFT |
| | LTISSLQPEDFATYYCQQSYSTPYTFGQGTKLEIKRLXXYKDHDGDYKDHDIDXXXXXDXAA |
| | [SEQ ID NO: 268] |
| DLG2- | EVQLLESGGGLVQPGGSLRLSCAASGFTFSSYSMYWVRQAPGKGLEWVSGISSYSYYTSYADSVKGRFT |
| 1 (1) | ISRDNSKNTLYLQMNSLRAEDTAVYYCARAFHGTPSIDYWGQGTLVTVSSGGGGSGGGGSGGGGSDIQM |
| | TQSPSSLSASVGDRVTITCRASQSISSYLNWYQQKPGKAPKLLIYAASSLQSGVPSRFSGSGSGTDFTL |
| | TIXSLQPEDFATYYCQXSNFXGLPTFXQGXKLEIXRLX-X-RX-R-LXXS-HRLQX-XXXXG |
| | [SEQ ID NO: 269] |
| DLG2- | EVQLLESGGGLVQPGGSLRLSCAASGFTFSGYSMSWVRQAPGKGLEWVSYISYSGYDTYYADSVKGRFT |
| 1 (2) | ISRDNSKNTLYLQMNSLRAEDTAVYYCARSYYSYGYWHIDYWGQGTLVTVSSGGGGSGGGGSGGGGSDI |
| | QMTQSPSSLSASVGDRVTITCRASQSISSYLNWYQQKPGKAPKLLIYAASSLQSGVPSRFSGSGSGTDF |
| | TLTISSLQPEDFATYYCQQNSYSGPFTFGQGTXLEXKRLGXYKDHDGDYKDHDIDYXDDXXXXAAXXXH |
| | HX-SPRXXXXXXXXEXYYARSLAVXXXRXDWXX [SEQ ID NO: 270] |
| DPOL | EVQLLESGGGLVQPGGSLRLSCAASGFTFGSYSMYWVRQAPGKGLEWVSSISYGGGYTSYADSVKGRFT |
| M (1) | ISRDNSKNTLYLQMNSLRAEDTAVYYCARGYYYMDYWGQGTLVTVSSGGGGSGGGGSGGGGSDIQMTQS |
| | PSSLSASVGDRVTITCRASQSISSYLNWYQQKPGKAPKLLIYAASSLQSGVPSRFSGSGSGTDFTLTIS |
| | SLQPEDFATYYCQQSWSPFTFGQGXKLEIKRLXXYKDHDGDYXDHDIXXXDDDDXAA |
| | [SEQ ID NO: 271] |
| DPOL | EVQLLESGGGLVQPGGSLRLSCAASGFTFGYYSMGWVRQAPGKGLEWVSGISYYSGYTSYADSVKGRFT |
| M (2) | ISRDNSKNTLYLQMNSLRAEDTAVYYCARVGTWFTAFDYWGQGTLVTVSSGGGGSGGGGSGGGGSDIQM |
| | TQSPSSLSASVGDRVTITCRASQSISSYLNWYQQKPGKAPKLLIYAASSLQSGVPSRFSGSGSGTDFTL |
| | TISSLQPEDFATYYCQQYYVPFTFGQGTKLEIKRLGDYKDHDGDYKDHDIDXXXDDDKAA |
| | [SEQ ID NO: 272] |
| DLG4- | EVQLLESGGGLVQPGGSLRLSCAASGFTFGSYYMSWVRQAPGKGLEWVSGISGSYGYTYYADSVKGRFT |
| 2 (1) | ISRDNSKNTLYLQMNSLRAEDTAVYYCARVSSGSAAFDYWGQGTLVTVSSGGGGSGGGGSGGGGSDIQM |
| | TQSPSSLSASVGDRVTITCRASQSISSYLNWYQQKPGKAPKLLIYAASSLQSGVPSRFXGSGSXTDFTL |
| | TIXXLQPEXFATYYCQQYFSLLTFGQGTXXXDQTPXXX-RP-RXLXXS-HXXXX-XXXGXXXXXXXXXX |
| | XXXXXXX [SEQ ID NO: 273] |
| DLG4- | EVQLLESGGGLVQPGGSLRLSCAASGFTFYSSYMYWVRQAPGKGLEWVSGISSSSGSTYYADSVKGRFT |
| 2 (2) | ISRDNSKNTLYLQMNSLRAEDTAVYYCARYGYYSWGFDYWGQGTLVTVSSGGGGSGGGGSGGGGSDIQM |
| | TQSPSSLSASVGDRVTITCRASQSISSYLNWYQQKPGKAPKLLIYAASSLQSGVPSRFSGSGSGTDFTL |
| | TISSLQPEDFATYYCQQGAGFPPTFGQGTKLEIKRLGDYKDHDGDYKDHDIXXRMXXXRRP |
| | [SEQ ID NO: 274] |
| GOR | EVQLLESGGGLVQPGGSLRLSCAASGFTFSSYYMGWVRQAPGKGLEWVSSIYGYGGGTYYADSVKGRFT |
| S2-1 | ISRDNSKNTLYLQMNSLRAEDTAVYYCARGGSYFDYWGQGTLVTVSSGGGGSGGGGSGGGGSDIQMTQS |
| (1) | PSSLSASVGDRVTITCRASQSISSYLNWYQQKPGKAPKLLIYAASSLQSGVPSRFSGSGSGTDFTLTIS |
| | SLQPEDFATYYCQQVYGPLTFGQGTKLEIKRLX-L-RP-RXX-XIMTSXXRXXXTRRP |
| | [SEQ ID NO: 275] |
| GOR | EVQLLESGGGLVQPGGSLRLSCAASGFTFSYYSMGWVRQAPGKGLEWVSSISYSGYYTYYADSVKGRFT |
| S2-1 | ISRDNSKNTLYLQMNSLRAEDTAVYYCARSGHHVSFDYWGQGTLVTVSSGGGGSGGGGSGGGGSDIQMT |
| (2) | QSPSSLSASVGDRVTITCRASQSISSYLNWYQQKPGKAPKLLIYAASSLQSGVPSRFSGSGSGTDFTLT |
| | ISSLQPEDFATYYCQQGFYPFTFGQGTKLEIKRLGDYKDHDGDYKDHDIDYXDDDDKAA |
| | [SEQ ID NO: 276] |
| INAD | EVQLLESGGGLVQPGGSLRLSCAASGFTFSSYAMSWVRQAPGKGLEWVSAISGSGGSTYYADSVKGRFT |
| L-1 | ISRDNSKNTLYLQMNSLRAEDTAVYYCARDYVSAYGGYFDYWGQGTLVTVSSGGGGSGGGGSGGGGSDI |
| (1) | QMTQSPSSLSASVGDRVTITCRASQSISSYLNWYQQKPGKAPKLLIYAASSLQSGVPSRFSGSGSGTDF |
| | TLTISSLQPEXFATYYCQQGYGSLHTFXQGXKLEIKRLXXYKDHXGDYXDHDIDXKDXDDKAA |
| | [SEQ ID NO: 277] |
| INAD | EVQLLESGGGLVQPGGSLRLSCAASGFTFSSYAMSWVRQAPGKGLEWVSAISGSGGSTYYADSVKGRFT |
| L-1 | ISRDNSKNTLYLQMNSLRAEDTAVYYCARWTSGGYLDYWGQGTLVTVSSGGGGSGGGGSGGGGSDIQMT |
| (2) | QSPSSLSASVGDRVTITCRASQSISSYLNWYQQKPGKAPKLLIYAASXLQSGVPSRFSGSGSGTDFTLT |
| | IXSLQPEDFXXYYCQQGWSLLXFGQGXXXXRSNA-VXIXXMIVXIKIXXXXXRMXXXXXXPX |
| | [SEQ ID NO: 278] |
| KCC2 | EVQLLESGGGLVQPGGSLRLSCAASGFTFSSYAMSWVRQAPGKGLEWVSAISGSGGSTYYADSVKGRFT |
| B-3 | ISRDNSKNTLYLQMNSLRAEDTAVYYCARDFSYGFDYWGQGTLVTVSSGGGGSGGGGSGGGGSDIQMTQ |
| (2) | SPSSLSASVGDRVTITCRASQSISSYLNWYQQKPGKAPKLLIYAASSLQSGVPSRFSGSGSGTDFTLTI |
| | SSLQPEXFATYYCQQGSDDPYTFGQGXKLEIKRLGXYKDHDGDYXDHDIDXXDXXXXAA |
| | [SEQ ID NO: 279] |
| KCC2 | EVQLLESGGGLVQPGGSLRLSCAASGFTFYSSYMYWVRQAPGKGLEWVSSIGGSSYSTYYADSVKGRFT |
| B-3 | ISRDNSKNTLYLQMNSLRAEDTAVYYCARFHDYWALDYWGQGTLVTVSSGGGGSGGGGSGGGGSDIQMT |
| (1) | QSPSSLSASVGDRVTITCRASQSISSYLNWYQQKPGKAPKLLIYAASSLQSGVPSRFSGSGSGTDFTLT |
| | ISSLQPEXFATYYCXQSTVWYLPTFGQGXXLEIXXXXDYKDHDX-L-XS-HXLXXMXXXXRP |
| | [SEQ ID NO: 280] |
| ITCH- | EVQLLESGGGLVQPGGSLRLSCAASGFTFYYSYMYWVRQAPGKGLEWVSGIGGYGGSTSYADSVKGRFT |
| 2 (1) | ISRDNSKNTLYLQMNSLRAEDTAVYYCARVVGAGDFDYWGQGTLVTVSSGGGGSGGGGSGGGGSDIQMT |
| | QSPSSLSASVGDRVTITCRASQSISSYLNWYQQKPGKAPKLLIYAASSLQSGVPSRFSGSGXGTDFTLT |
| | ISSLQPEDFATYYCQQYFFYYLHTFXXGXXXWXSNA-XXXKXMXXXYXDHXIXXXXDDXXXXRPXXXXX |
| | LIXXXXXPXXXX [SEQ ID NO: 281] |
| ITCH- | EVQLLESGGGLVQPGGSLRLSCAASGFTFYSYGMYWVRQAPGKGLEWVSYIPGYGYSTSYADSVKGRFT |
| 2 (2) | ISRDNSKNTLYLQMNSLRAEDTAVYYCARSFGYGDFDYWGQGTLVTVSSGGGGSGGGGSGGGGSDIQMT |
| | QSPSSLSASVGDRVTITCRASQSISSYLNWYQQKPGKAPKLLIYAASSLQSGVPSRFSGSGSGTXFTLT |
| | IXSLQPEDFATYYCQQYDYSPYTFGXGXKLEIXRLGXYKDHDGDYXXXDIDYXG-XXXXXXPXSSSXXI |
| | XXXXXSXXP [SEQ ID NO: 282] |
| KCC4 | EVQLLESGGGLVQPGGSLRLSCAASGFTFGGGYMGWVRQAPGKGLEWVSYISGSGSYTYYADSVKGRFT |
| (1) | ISRDNSKNTLYLQMNSLRAEDTAVYYCARYSSVSSYSYFDYWGQGTLVTVSSGGGGSGGGGSGGGGSDI |
| | QMTQSPSSLSASVGDRVTITCRASQSISSYLNWYQQKPGKAPKLLIYAASSLQSGVPSRFSGSGSGTDF |
| | TLTISSLQPEDFATYYCQQSVHLPTFGQGTKLEIKRLGDYXDHDGDYXDHDIXXXDXXXKAA |
| | [SEQ ID NO: 283] |
| KCC4 | EVQLLESGGGLVQPGGSLRLSCAASGFTFPYSYMYWVRQAPGKGLEWVSAISGSGGSTYYADSVKGRFT |
| (2) | ISRDNSKNTLYLQMNSLRAEDTAVYYCARYASYSAIDYWGQGTLVTVSSGGGGSGGGGSGGGGSDIQMT |
| | QSPSSLSASVGDRVTITCRASQSISSYLNWYQQKPGKAPKLLIYAASSLQSGVPSRFSGSGSGTDFTLT |
| | ISSLQPEXFATYYCQQTGGLYTFGQGXKLXIKRLGXYKDHDXDYXXXDXDYXDDDXXAXXXXHHXXXSP |
| | RWXSXXPXSXSXXXRXX [SEQ ID NO: 284] |
| KKCC | EVQLLESGGGLVQPGGSLRLSCAASGFTFYYSYMYWVRQAPGKGLEWVSAISGSGGSTYYADSVKGRFT |
| 1-1 | ISRDNSKNTLYLQMNSLRAEDTAVYYCARSYTPASYRFDYWGQGTLVTVSSGGGGSGGGGSGGGGSDIQ |
| (1) | MTQSPSSLSASVGDRVTITCRASQSISSYLNWYQQKPGKAPKLLIYAASSLQSGVPSRFSGSGSGTDFT |
| | LTISSLQPEDFATYYCQQSYSTPYTFGQGXKLEIKRLGDYXDHDGDYKDHDXDXKDDDXXXXRPSXSSX |
| | LITXXXLXXALX-VVLXALXXPXFYXVXTXKTXXXXXXXXXXXHPXXXXX [SEQ ID NO: 285] |
| KKCC | EVQLLESGGGLVQPGGSLRLSCAASGFTFGGSGMGWVRQAPGKGLEWVSSIGYGYSSTYYADSVKGRFT |
| 1-1 | ISRDNSKNTLYLQMNSLRAEDTAVYYCARYSYHYYPDFDYWGQGTLVTVSSGGGGSGGGGSGGGGSDIQ |
| (2) | MTQSPSSLSASVGDRVTITCRASQSISSYLNWYQQKPGKAPKLLIYAASSLQSGVPSRFSGSGSGTDFT |
| | LTISSLQPEDFATYYCQQVFRYPLTFGQGXKLEIKRLXXYXDHDGXYXDHDIDYXDXXXXAA |
| | [SEQ ID NO: 826] |
| LIN7 | EVQLLESGGGLVQPGGSLRLSCAASGFTFSGYSMSWVRQAPGKGLEWVSSISSGSYSTSYADSVKGRFT |
| A (1) | ISRDNSKNTLYLQMNSLRAEDTAVYYCARGYSYFDRSFDYWGQGTLVTVSSGGGGSGGGGSGGGGSDIQ |
| | MTQSPSSLSASVGDRVTITCRASQSISSYLNWYQQKPGKAPKLLIYAASSLQSGVPSRFSGSGSGTDFT |
| | LTISSLQPEDFATYYCQQNPGPFTFGQGTKLEIKRLGXYKDHDGDYKDHDIDYXDDDDXAA |
| | [SEQ ID NO: 287] |
| LIN7 | EVQLLESGGGLVQPGGSLRLSCAASGFTFYSYGMSWVRQAPGKGLEWVSSISSSYSYTYYADSVKGRFT |
| A (2) | ISRDNSKNTLYLQMNSLRAEDTAVYYCARGYYGGFDYWGQGTLVTVSSGGGGSGGGGSGGGGSDIQQSX |
| | MTQSPSSLSASVGDRVTITCRASQSISSYLNWYQQKPGKAPKLLIYAASSLQSGVPSRFSGSGSGTDFT |
| | LTISSLQPEXFATYYCQYTPFTFGQGXKLEIKRLGDYKDHDGDYKDHDIDXKDDDDXAA |
| | [SEQ ID NO: 288] |
| SNTA | EVQLLESGGGLVQPGGSLRLSCAASGFTFSSYSMSWVRQAPGKGLEWVSGIYGGGSSTYYADSVKGRFT |
| 1 (1) | ISRDNSKNTLYLQMNSLRAEDTAVYYCARPSSSGSYVMDYWGQGTLVTVSSGGGGSGGGGSGGGGSDIQ |
| | MTQSPSSLSASVGDRVTITCRASQSISSYLNWYQQKPGKAPKLLIYAASSLQSGVPSRFSGSGSGTDFT |
| | LTISSLQPEDFATYYCQQSYSPHTFGQGXKLEIKRLGXYKDHDGXYKDHDXXXXDXDDXAA |
| | [SEQ ID NO: 289] |
| SNTA | EVQLLESGGGLVQPGGSLRLSCAASGFTFSSYAMSWVRQAPGKGLEWVSAISGSGGSTYYADSVKGRFT |
| 1 (2) | ISRDNSKNTLYLQMNSLRAEDTAVYYCARYPVYYYFDYWGQGTLVTVSSGGGGSGGGGSGGGGSDIQMT |
| | QSPSSLSASVGDRVTITCRASQSISSYLNWYQQKPGKAPKLLIYAASSLQSGVPSRFSGSGSGTDFTLT |
| | ISSLQPEDFATYYCQQSYVPLSTFGQGTKLEIKRLGXYKDHDGDYKDHDIDXXDDDDXAA |
| | [SEQ ID NO: 290] |
| MAG | EVQLLESGGGLVQPGGSLRLSCAASGFTFSYSSMSWVRQAPGKGLEWVSGISGSGYSTYYADSVKGRFT |
| I1-1 | ISRDNSKNTLYLQMNSLRAEDTAVYYCARGYSGFDYWGQGTLVTVSSGGGGSGGGGSGGGGSDIQMTQS |
| (1) | PSSLSASVGDRVTITCRASQSISSYLNWYQQKPGKAPKLLIYAASSLQSGVPSRFSGSGSGTDFTLTIS |
| | SLQPEDFATYYCQQYGYATLPTFGQGXKLEIKRLGXYKDHDGDYKDHDIDYXXDDDXAA |
| | [SEQ ID NO: 291] |
| MAG | EVQLLESGGGLVQPGGSLRLSCAASGFTFSSYAMSWVRQAPGKGLEWVSGISGSYGYTSYADSVKGRFT |
| I1-1 | ISRDNSKNTLYLQMNSLRAEDTAVYYCARGYYSYYDGPIDYWGQGTLVTVSSGGGGSGGGGSGGGGSDI |
| (2) | QMTQSPSSLSASVGDRVTITCRASQSISSYLNWYQQKPGKAPKLLIYAASSLQSGVPSRFSGSGSGTDF |
| | TLTISSLQPEDFATYYCQQSYSTPYTFXQGTKLEIKRLXDYKDHXGXYKDHDIDXXDDDXXAXAHXHXH |
| | XXSPRXXSXXPXSESXXXRXXAVVXXXXDWENPXXXNXIAXXXXPXXXXXXXX |
| | [SEQ ID NO: 292] |
| MAR | EVQLLESGGGLVQPGGSLRLSCAASGFTFSGYGMGWVRQAPGKGLEWVSSISYYGGGTGYADSVKGRFT |
| K1-1 | ISRDNSKNTLYLQMNSLRAEDTAVYYCARFDDFYASHYGIYIDYWGQGTLVTVSSGGGGSGGGGSGGGG |
| (1) | SDIQMTQSPSSLSASVGDRVTITCRASQSISSYLNWYQQKPGKAPKLLIYAASSLQSGVPSRFSGSGSG |
| | TDFTLTISSLQPEDFATYYCQQASSLFTFGXXXKLEIKRLXDYKDHDXDYKDHDIDYKXDXDKAXXHHH |
| | HHX-SXXXXSXSPYSEXXYXRXLXXRFXTXXXGKPXVTXXXRXXXXPPFXXWXXXXXX |
| | [SEQ ID NO: 293] |
| MAR | EVQLLESGGGLVQPGGSLRLSCAASGFTFSSYAMSWVRQAPGKGLEWVSAISGSGGSTYYADSVKGRFT |
| K1-1 | ISRDNSKNTLYLQMNSLRAEDTAVYYCARYSYGSYFDYWGQGTLVTVSSGGGGSGGGGSGGGGSDIQMT |
| (2) | QSPSSLSASVGDRVTITCRASQSISSYLNWYQQKPGKAPKLLIYAASSLQSGVPSRFSGSGSGTDFTLT |
| | ISSLQPEDFATYYCQQYHGWPPTFXQGTKLEIKRLGDYKDHDGDYKDHDIDXXDDDDKAAXHHHHHH- |
| | SPRXXSXXPYSESXYARXLAVVLXVXTGKTXXYXXXSPXXXSPFXXLAXXRXXXXXXXX |
| | [SEQ ID NO: 294] |
| OTU | EVQLLESGGGLVQPGGSLRLSCAASGFTFYSSSMYWVRQAPGKGLEWVSGISSYGSYTSYADSVKGRFT |
| 6B | ISRDNSKNTLYLQMNSLRAEDTAVYYCARGPFFDYWGQGTLVTVSSGGGGSGGGGSGGGGSDIQMTQSP |
| (1) | SSLSASVGDRVTITCRASQSISSYLNWYQQKPGKAPKLLIYAASSLQSGVPSRFSGSGSGTDFTLTISS |
| | LQPEDFATYYCQQFPNPHTFGQGXRLEIKRLGDYKDHDGDYKDHDIXXXDXDDXAA |
| | [SEQ ID NO: 295] |
| OTU | EVQLLESGGGLVQPGGSLRLSCAASGFTFSSSGMSWVRQAPGKGLEWVSSISGSYGYTSYADSVKGRFT |
| 6B | ISRDNSKNTLYLQMNSLRAEDTAVYYCARSYSYVYGFDYWGQGTLVTVSSGGGGSGGGGSGGGGSDIQM |
| (2) | TQSPSSLSASVGDRVTITCRASQSISSYLNWYQQKPGKAPKLLIYAASSLQSGVPSRFSGSGSGTDFTL |
| | TISSLQPEDFATYYCQQNVHLYTFGQGXKLEIKRLGDYKDHDGDYKDHDIDXXDDXDXAA |
| | [SEQ ID NO: 296] |
| NOS | EVQLLESGGGLVQPGGSLRLSCAASGFTFGSYYMYWVRQAPGKGLEWVSGISSYSGYTYYADSVKGRFT |
| 1-1 | ISRDNSKNTLYLQMNSLRAEDTAVYYCARSADSGGFDYWGQGTLVTVSSGGGGSGGGGSGGGGSDIQMT |
| (1) | QSPSSLSASVGDRVTITCRASQSISSYLNWYQQKPGKAPKLLIYAASSLQSGVPSRFSGSGSGXXFTLT |
| | ISSLQPEXFATYYCQQSYFYGLPTFXQGTKLEIXRLXXYXDHDXDXXXHDIXYXD |
| | [SEQ ID NO: 297] |
| NOS | EVQLLESGGGLVQPGGSLRLSCAASGFTFSSYAMSWVRQAPGKGLEWVSAISGSGGSTYYADSVKGRFT |
| 1-1 | ISRDNSKNTLYLQMNSLRAEDTAVYYCARPGYYGAAYYRSFIDYWGQGTLVTVSSGGGGSGGGGSGGGG |
| (2) | SDIQMTQSPSSLSASVGDRVTITCRASQSISSYLNWYQQKPGKAPKLLIYAASSLQSGVPSRFSGSGSG |
| | TDFTLTISSLQPEXFATYYCQQSYSTPYTFGQGXKLEIKRLGXYKDHDXXYKDHDIDXXXXDDKAA |
| | [SEQ ID NO: 298] |
| OTU | EVQLLESGGGLVQPGGSLRLSCAASGFTFYSSSMSWVRQAPGKGLEWVSGISSSGYSTGYADSVKGRFT |
| B1-1 | ISRDNSKNTLYLQMNSLRAEDTAVYYCARYGGYHTYLDYWGQGTLVTVSSGGGGSGGGGSGGGGSDIQM |
| (1) | TQSPSSLSASVGDRVTITCRASQSISSYLNWYQQKPGKAPKLLIYAASSLQSGVPSRFSGSGSGTDFTL |
| | TISSLQPEDFATYYCQQYSYTSLFTFXXGXXLXIKRXXXYKXHXXDYKDHDXXXXXDXXXAXXXHHXH |
| | X-SXX [SEQ ID NO: 299] |
| OTU | EVQLLESGGGLVQPGGSLRLSCAASGFTFSSYAMSWVRQAPGKGLEWVSAISGSGGSTYYADSVKGRFT |
| B1-1 | ISRDNSKNTLYLQMNSLRAEDTAVYYCARYHYYAGFDYWGQGTLVTVSSGGGGSGGGGSGGGGSDIQMT |
| (2) | QSPSSLSASVGDRVTITCRASQSISSYLNWYQQKPGKAPKLLIYAASSLQSGVPSRFSGSGSGTDFTLT |
| | ISSLQPEXFATYYCXQSGSFLPTFGQGXXXEIKRLGXYXXHXXXYKXHXIDXXMXMXRXXPIXXIXXXX |
| | XX [SEQ ID NO: 300] |
| OTU | EVQLLESGGGLVQPGGSLRLSCAASGFTFGGYSMSWVRQAPGKGLEWVSGIYSYSYSTSYADSVKGRFT |
| B2-1 | ISRDNSKNTLYLQMNSLRAEDTAVYYCARHPNWSYFDYWGQGTLVTVSSGGGGSGGGGSGGGGSDIQMT |
| (1) | QSPSSLSASVGDRVTITCRASQSISSYLNWYQQKPGKAPKLLIYAASSLQSGVPSRFSGSGSGTDFTLT |
| | ISSLQPEDFATYYCQQXYSTPYTFGQGXKLXXXRLXDYKDHDXDYKDHDXDXXDDXXXXAAHXHHHX-X |
| | PRWXSXXPYXEXXYXRSLXXXFXXXXLGKPXXYXXXXXXXXSPFXXXX [SEQ ID NO: 301] |
| OTU | EVQLLESGGGLVQPGGSLRLSCAASGFTFYGSYMYWVRQAPGKGLEWVSYISGSSGSTSYADSVKGRFT |
| B2-1 | ISRDNSKNTLYLQMNSLRAEDTAVYYCARYGHASFDYWGQGTLVTVSSGGGGSGGGGSGGGGSDIQMTQ |
| (2) | SPSSLXASVGDRVTITCRASXXISSYLNWYXXKPGKAPKLLIYAASXLQSGVPSRFXXSGSGTXFTLTI |
| | XXLXPXXFATYYCQXGSXLPXFGXXXXXXXXXXXXYKXXXXX [SEQ ID NO: 302] |
| PAK4- | EVQLLESGGGLVQPGGSLRLSCAASGFTFSSYSMYWVRQAPGKGLEWVSSISGSGSYTYYADSVKGRFT |
| 1 (1) | ISRDNSKNTLYLQMNSLRAEDTAVYYCARYYHRSHRFPLDYWGQGTLVTVSSGGGGSGGGGSGGGGSDI |
| | QMTQSPSSLSASVGDRVTITCRASQSISSYLNWYQQKPGKAPKLLIYAASSLQSGVPSRFSGSGSGTDF |
| | TLTISSLQPEDFATYYCQQSSYPFTFGXXPSWRXNA-VIIKTMTVIIKIMTSIXXMTMXRRP |
| | [SEQ ID NO: 303] |
| PAK4- | EVQLLESGGGLVQPGGSLRLSCAASGFTFGYYSMSWVRQAPGKGLEWVSSIYSYSSGTYADSVKGRFTI |
| 1 (2) | SRDNSKNTLYLQMNSLRAEDTAVYYCARGSSVIDYWGQGTLVTVSSGGGGSGGGGSGGGGSDIQMTQSP |
| | SSLSASVGDRVTITCRASQSISSYLNWYQQKPGKAPKLLIYAASSLQSGVPSRFSGSGSGTDFTLTISS |
| | LQPEDFATYYCQQSYSTPYTFGQGXKLEIKRLGXYKDHDGDYKDHDXDXXDDDXXAA |
| | [SEQ ID NO: 304] |
| PRD | EVQLLESGGGLVQPGGSLRLSCAASGFTFSGYGMSWVRQAPGKGLEWVSSIGGSYYSTGYADSVKGRFT |
| M8-1 | ISRDNSKNTLYLQMNSLRAEDTAVYYCARSYSVHYPYYHDHFDYWGQGTLVTVSSGGGGSGGGGSGGGG |
| (1) | SDIQMTQSPSSLSASVGDRVTITCRASQSISSYLNWYQQKPGKAPKLLIYAASSLQSGVPSRFSGSGSG |
| | TDFTLTISSLQPEXFATYYCQQYFYPYTFGQGXKLEIKRLGDYXDHDGDYKDHDIXXXDDXXXAA |
| | [SEQ ID NO: 305] |
| PRD | EVQLLESGGGLVQPGGSLRLSCAASGFTFSYSSMYWVRQAPGKGLEWVSYISGYGGYTSYADSVKGRFT |
| M8-1 | ISRDNSKNTLYLQMNSLRAEDTAVYYCARDVGYYFWSGHSMDYWGQGTLVTVSSGGGGSGGGGSGGGGS |
| (2) | DIQMTQSPSSLSASVGDRVTITCRASQSIXSYLNWYQXKPXKAPKLLIYAASXLQSGVPSRFXXXGXXX |
| | XFTLTIXXLXPEXFXXXYCXXXSSXXTFXQXXXLXXXRX [SEQ ID NO: 306] |
| PTN1 | EVQLLESGGGLVQPGGSLRLSCAASGFTFSSYAMSWVRQAPGKGLEWVSGISGYSSMYADSVKGRFTIS |
| 3-1 | RDNSKNTLYLQMNSLRAEDTAVYYCARVYYPGHSMDYWGQGTLVTVSSGGGGSGGGGSGGGGSDIQMTQ |
| (1) | SPSSLSASVGDRVTITCRASQSISSYLNWYQQKPGKAPKWYAASSLQSGVPSRFSGSGSGTDFTLTISS |
| | LQPEDFATYYCQQSVHYPHTFGQGTKLEIKRLGXYKXHXGDYKDHDXDXXXXXXXXAAXXHHHH-SPRX |
| | XXXXPYSXXXXXRXXXXXFXTXXXXKPXXXXX [SEQ ID NO: 307] |
| PTN1 | EVQLLESGGGLVQPGGSLRLSCAASGFTFGSYYMSWVRQAPGKGLEWVSGIGSYSSYTGYADSVKGRFT |
| 3-1 | ISRDNSKNTLYLQMNSLRAEDTAVYYCARGHSYYYSPPFDYWGQGTLVTVSSGGGGSGGGGSGGGGSDI |
| (2) | QMTQSPSSLSASVGDRVTITCRASQSISSYLNWYQQKPGKAPKLLIYAASSLQSGVPSRFSGSGSGTDF |
| | TLTISSLQPEXFATYYCQQDGYSPFTFXQGXKLXIKRLXXYKDXDGXYXXHDIDYKXDXXXXA |
| | [SEQ ID NO: 308] |
| CHEK | EVQLLESGGGLVQPGGSLRLSCAASGFTFGSYSMSWVRQAPGKGLEWVSGISGSYSSTYYADSVKGFTI |
| 2 (1) | SRDNSKNTLYLQMNSLRAEDTAVYYCARGDSWVFDYWGQGTLVTVSSGGGGSGGGGSGGGGSDIQMTQS |
| | PSSLSASVGDRVTITCRASQSISSYLNWYQQKPGKAPKLLIYAASSLQSGVPSRFSGSGSGTDFTLTIS |
| | SLQPEDFATYYCQQSYSYPFTFGQGTKLEIKRLGXYKDHDGDYKDHDIDYXDDDXKAA |
| | [SEQ ID NO: 309] |
| CHEK | EVQLLESGGGLVQPGGSLRLSCAASGFTFYYSGMSWVRQAPGKGLEWVSGIGYSGYYTSYADSVKGRFT |
| 2 (2) | ISRDNSKNTLYLQMNSLRAEDTAVYYCARSSYYGTSGYVFDYWGQGTLVTVSSGGGGSGGGGSGGGGSD |
| | IQMTQSPSSLSASVGDRVTITCRASQSISSYLNWYQQKPGKAPKLLIYAASSLQSGVPSRFXGSGSGTD |
| | FTLTISSLQPEDFATYYCQQADVYPLTFGQGXKLEXKRLGXYXDHDGXXKDHDIXXXDDXXXRP |
| | [SEQ ID NO: 310] |
| CSNK | EVQLLESGGGLVQPGGSLRLSCAASGFTFGSYSMSWVRQAPGKGLEWVSSISGGYSYTSYADSVKGRFT |
| 1E | ISRDNSKNTLYLQMNSLRAEDTAVYYCARSFSYYYGVFLDYWGQGTLVTVSSGGGGSGGGGSGGGGSDI |
| (1) | QMTQSPSSLSASVGDRVTITCRASQSISSYLNWYQQKPGKAPKLLIYAASSLQSGVPSRFSGSGSGTDF |
| | TLTISSLQPEDFATYYCQQGYSSYPLTFGQGXKLEIKRLGDYKDHDGXYKDHDIDYXDDXDXAA |
| | [SEQ ID NO: 311] |
| CSNK | EVQLLESGGGLVQPGGSLRLSCAASGFTFSSYAMSWVRQAPGKGLEWVSGIYSSYGGTYYADSVKGRFT |
| 1E | ISRDNSKNTLYLQMNSLRAEDTAVYYCARGVYMDYWGQGTLVTVSSGGGGSGGGGSGGGGSDIQMTQSP |
| (2) | SSLSASVGDRVTITCRASQSISSYLNWYQQKPGKAPKWYAASSLQSGVPSRFSGSGSGTDFTLTISSLQ |
| | PEXFATYYCQQVIFPFTFGQGXKLEIKRLGXYKDHDGDYXDHDIXYXDDXXKAAXHHHHHH*SPRWXXX |
| | SPYSXSXYXRSLAXVLXRXXWXNPXXXXXIXXXHIXXXXXXX [SEQ ID NO: 312] |
| DUSP | EVQLLESGGGLVQPGGSLRLSCAASGFTFSSYAMSWVRQAPGKGLEWVSAISGSGGSTYYADSVKGRFT |
| 7 (1) | ISRDNSKNTLYLQMNSLRAEDTAVYYCARGGRGIDYWGQGTLVTVSSGGGGSGGGGSGGGGSDIQMTQS |
| | PSSLSASVGDRVTITCRASQSISSYLNWYQQKPGKAPKLLIYAASSLQSGVPSRFSGSGSGTDFTLTIS |
| | SLQPEDFATYYCQQSYSTPYTFGXXXKLEIKRLXDYXDHDGDYXXHDXDXXMTXXXG |
| | [SEQ ID NO: 313] |
| DUSP | EVQLLESGGGLVQPGGSLRLSCAASGFTFSSYAMSWVRQAPGKGLEWVSAISGSGGSTYYADSVKGRFT |
| 7 (2) | ISRDNSKNTLYLQMNSLRAEDTAVYYCARXXXXXXYWGQGTLVTVSSGGGGSGGGGSGGGGSDIQMTQS |
| | PSSLSASVGDRVTITCRASQSISSYLNWYQQKPGKAPKLLIYAASSLQSGVPSRFSGSGSGTDFTLTIS |
| | SLQPEDFATYYCQQSYSTPYTFXQGXKLXXXRXGXYXXXXX [SEQ ID NO: 314] |
| FER | EVQLLESGGGLVQPGGSLRLSCAASGFTFGYSYMHWVRQAPGKGLEWVSYISSYGGYTGYADSVKGRFT |
| (1) | ISRDNSKNTLYLQMNSLRAEDTAVYYCARSSVDSVVWYGGYIDYWGQGTLVTVSSGGGGSGGGGSGGGG |
| | SDIQMTQSPSSLSASVGDRVTITCRASQSISSYLNWYQQKPGKAPKLLIYAASSLQSGVPSRFSGSGSG |
| | TDFTLTISSLQPEDFATYYCQQSGFNSPHTFGQGXKLEIKRLGXYKDHDGXYKDHDIDXXDDDDXAXAX |
| | HHHHH*SPRWXSXSPYSESXYXRXLXXXXXXXDWEXXXXXXLXRXXXXPXFXXXXX |
| | [SEQ ID NO: 315] |
| FER | EVQLLESGGG LVQPGGSLRLSCAASGFTFGGYYMYWVRQAPGKGLEWVSGISYSGSYTYYADSVKGRF |
| (2) | TISRDNSKNTLYLQMNSLRAEDTAVYYCARSYGPVYYSSSLDYWGQGTLVTVSSGGGGSGGGGSGGGGS |
| | DIQMTQSPSSLSASVGDRVTITCRASQSISSYLNWYQQKPGKAPKLLIYAASSLQSGVPSRFSGSGSGT |
| | DFTLTISSLQPEDFATYYCQQSYSTPYTFXQGXKLEIKRLGXYKDHDXDYXDHDXXXXDXDXXRP |
| | [SEQ ID NO: 316] |
| GRK5 | EVQLLESGGGLVQPGGSLRLSCAASGFTFYGYGMSWVRQAPGKGLEWVSSISGGGYGTYYADSVKGRFT |
| (1) | ISRDNSKNTLYLQMNSLRAEDTAVYYCARGYSYYSGYFDYWGQGTLVTVSSGGGGSGGGGSGGGGSDIQ |
| | MTQSPSSLSASVGDRVTITCRASQSISSYLNWYQQKPGKAPKLLIYAASSLQSGVPSRFSGSGSGTDFT |
| | LTISSLQPEDFATYYCQQSVGYLSTFGQGXKLEIKRLGXYKDHDGDYKDHDIDYXXDXXKAA |
| | [SEQ ID NO: 317] |
| PRKC | EVQLLESGGGLVQPGGSLRLSCAASGFTFSSYAMSWVRQAPGKGLEWVSAISGSGGSTYYADSVKGRFT |
| Z (1) | ISRDNSKNTLYLQMNSLRAEDTAVYYCARGSHGLDYWGQGTLVTVSSGGGGSGGGGSGGGGSDIQMTQS |
| | PSSLSASVGDRVTITCRASQSISSYLNWYQQKPGKAPKWYAASSLQSGVPSRFSGSGSGTDFTLTIXXL |
| | QPEXFATYYCQQSYSTPYTFGQGXKLXIKRLXXYKDHDGDYKXHDXDXXMTXXRXPPXXXIXIDXXXWX |
| | XXXXYXEXXX [SEQ ID NO: 318] |
| PRKC | EVQLLESGGGLVQPGGSLRLSCAASGFTFSSYAMSWVRQAPGKGLEWVSAISGSGGSTYYADSVKGRFT |
| Z (2) | ISRDNSKNTLYLQMNSLRAEDTAVYYCARGGHGIDYWGQGTLVTVSSGGGGSGGGGSGGGGSDIQMTQS |
| | PSSLSASVGDRVTITCRASQSISSYLNWYQQKPGKAPKLLIYAASSLQSGVPSRFSGSGSGTDFTLTIS |
| | SLQPEXFATYYCQQSYSTPYTFGXGTKLEIXRLGXYKXHDGDXKDHDIXYXXDXXXXPPIIIIIXDHXG |
| | XXX [SEQ ID NO: 319] |
| PRKG | EVQLLESGGGLVQPGGSLRLSCAASGFTFGYSGMSWVRQAPGKGLEWVSYIYGSSGYTYYADSVKGRFT |
| 2 (1) | ISRDNSKNTLYLQMNSLRAEDTAVYYCARSGPSYYYPPVYLDYWGQGTLVTVSSGGGGSGGGGSGGGGS |
| | DIQMTQSPSSLSASVGDRVTITCRASQSISSYLNWYQQKPGKAPKLLIYAASSLQSGVPSRFSGSGSGT |
| | DFTLTISSLQPEXFATYYCQQSYSTPYTFGQGTKLEIKRXGXYXDHDGDYKXHDIXXXXDXXXAA |
| | [SEQ ID NO: 320] |
| PRKG | EVQLLESGGGLVQPGGSLRLSCAASGFTFSSSSMGWVRQAPGKGLEWVSYISGYSSSTYYADSVKGRFT |
| 2 (2) | ISRDNSKNTLYLQMNSLRAEDTAVYYCARPTYGPGSARVYIDYWGQGTLVTVSSGGGGSGGGGSGGGGS |
| | DIQMTQSPSSLSASVGDRVTITCRASQSISSYLNWYQQKPGKAPKLLIYAASSLQSGVPSRFSGSGSGT |
| | DFTLTISSLQPEXFATYYCQQSGYPFTFGQGXKLEIKRLGXYKDHDGDYXDHDIDYXDXDXKAA |
| | [SEQ ID NO: 321] |
| PTPR | EVQLLESGGGLVQPGGSLRLSCAASGFTFSSYAMSWVRQAPGKGLEWVSAISGSGGSTYYADSVKGRFT |
| D (1) | ISRDNSKNTLYLQMNSLRAEDTAVYYCARYGFVTYPYGGGYLDYWGQGTLVTVSSGGGGSGGGGSGGGG |
| | SDIQMTQSPSSLSASVGDRVTITCRASQSISSYLNWYQQKPGKAPKLLIYAASSLQSGVPSRFSGSGSG |
| | TDFTLTISSLQPEXFATYYCQQSYSTPYTFXQGXKLEIXRLGDYKXHDGDYKDHDXDXXXXXXXAXAHH |
| | HHHHXSPRXXSXSPXSESXYXRSLAVVXXXXDWENXXVXXXXXXXXXPXXXXXXXXXXX |
| | [SEQ ID NO: 322] |
| PTPR | EVQLLESGGGLVQPGGSLRLSCAASGFTFGYSDMYWVRQAPGKGLEWVSGIGYSGYYTSYADSVKGRFT |
| D (2) | ISRDNSKNTLYLQMNSLRAEDTAVYYCARNASGVYSYAYFDYWGQGTLVTVSSGGGGSGGGGSGGGGSD |
| | IQMTQSPSSLSASVGDRVTITCRASQSISSYLNWYQQKPGKAPKLLIYAASSLQSGVPSRFSGSGSGTD |
| | FTLTISSLQPEXFATYYCQQYSYPFTFGQGTKLEXKRXXDYKDHDXDYXXHDXXXXXXXXXGXXSSSSS |
| | LXTAVXLXFXXXXVXXXXLXXXXFXXX*XXXPXLPXLIXXXXXPFXXXXXXXXXAXXXX |
| | [SEQ ID NO: 323] |
| PTPP | EVQLLESGGGLVQPGGSLRLSCAASGFTFSSYAMSWVRQAPGKGLEWVSAISGSGGSTYYADSVKGRFT |
| RN2 | ISRDNSKNTLYLQMNSLRAEDTAVYYCARGPASSAYFDYWGQGTLVTVSSGGGGSGGGGSGGGGSDIQM |
| (1) | TQSPSSLSASVGDRVTITCRASQSISSYLNWYQQKPGKAPKWYAASSLQSGVPSRFSGSGSGTDFTLTI |
| | SSLCIPEDFATYYCQQSYSTPYTFXQGTKLEIKRLXDYKDHDGDYXDHDXDYKDDXXXAA |
| | [SEQ ID NO: 324] |
| PTPP | EVQLLESGGGLVQPGGSLRLSCAASGFTFSGYSMSWVRQAPGKGLEWVSSISGSYGSTYYADSVKGRFT |
| RN2 | ISRDNSKNTLYLQMNSLRAEDTAVYYCARYGYPYFGMDYWGQGTLVTVSSGGGGSGGGGSGGGGSDIQM |
| (2) | TQSPSSLSASVGDRVTITCRASQSISSYLNWYQQKPGKAPKLLIYAASSLQSGVPSRFSGSGSGTDFTL |
| | TISSLQPEDFATYYCQQSYSTPYTFGQGXKLEIKRLGDYKDHDGXYKDHDIDYKDXXDXAA |
| | [SEQ ID NO: 325] |
| SHC1 | EVQLLESGGGLVQPGGSLRLSCAASGFTFSSYAMSWVRQAPGKGLEWVSYISYYSGYTYYADSVKGRFT |
| (1) | ISRDNSKNTLYLQMNSLRAEDTAVYYCARHYYGGFDYWGQGTLVTVSSGGGGSGGGGSGGGGSDIQMTQ |
| | SPSSLSASVGDRVTITCRASQSISSYLNWYQQKPGKAPKLLIYAASSLQSGVPSRFSGSGSGTDFTLTI |
| | SSLQPEXFATYYCQQGYTLYTFGQGXKLEIKRLGXYKDHDXDYKDHDXXXX*XXXAA |
| | [SEQ ID NO: 326] |
| SHC1 | EVQLLESGGGLVQPGGSLRLSCAASGFTFSSSYMSWVRQAPGKGLEWVSSIGGSGYSTYYADSVKGRFT |
| (2) | ISRDNSKNTLYLQMNSLRAEDTAVYYCARSYHYYIDYWGQGTLVTVSSGGGGSGGGGSGGGGSDIQMTQ |
| | SPSSLSASVGDRVTITCRASQSISSYLNWYQQKPGKAPKWYAASSLQSGVPSRFSGSGSGTDFILTISS |
| | LQPEDFATYYCQQPYFPPTFGXGTXLEXKRLGDYKXHDXDYKXHDIXXXMTMXRRP |
| | [SEQ ID NO: 327] |
| STAP | EVQLLESGGGLVQPGGSLRLSCAASGFTFSGYSMGWVRQAPGKGLEWVSGISSYYYGTSYADSVKGRFT |
| 1 (1) | ISRDNSKNTLYLQMNSLRAEDTAVYYCARSWIVGSSWDGDAFDYWGQGTLVTVSSGGGGSGGGGSGGGG |
| | SDIQMTQSPSSLSASVGDRVTITCRASQSISSYLNWYQQKPGKAPKLLIYAASSLQSGVPSRFSGSGSG |
| | TDFTLTISSLQPEDFATYYCQQSYWYPLTFGQGTKLEIKRLGDYKDHDGDYKDHDIDYKDDDDKAAAHH |
| | HHHH* [SEQ ID NO: 328] |
| STAP | EVQLLESGGGLVQPGGSLRLSCAASGFTFSSYAMSWVRQAPGKGLEWVSAISGSGGSTYYADSVKGRFT |
| 2 (2) | ISRDNSKNTLYLQMNSLRAEDTAVYYCARGGGYFDYWGQGTLVTVSSGGGGSGGGGSGGGGSDIQMTQS |
| | PSSLSASVGDRVTITCRASQSISSYLNWYQQKPGKAPKLLIYAASSLQSGVPSRFSGSGSGTDFTLTIS |
| | SLQPEDFATYYCQQSYSTPYTFGQGTKLEIKRLGDYKDHDGDYXDHDXDXXMXXXRRP |
| | [SEQ ID NO: 329] |

*The structure of the scFv antibodies is described in Söderlind et al., 2000, ‘Recombining germline-derived CDR sequences for creating diverse single-framework antibody libraries’ Nature Biotechnol., 18(8):852-6, which is incorporated herein by reference in its entirety.

TABLE 8

| | | Exemplary |
|---|---|---|
| Antigen | Publication name | SEQ ID NO. |
| Interleukin-4 | IL-4 (2) | 10 |
| Interleukin-13 | IL-13 (2) | 32 |
| Vascular endothelial | VEGF (2) | 35 |
| growth factor | | |
| Lymphotoxin-alpha | TNF-b (2) | 46 |
| Interferon gamma | IFN-γ (3) | 55 or 56 |
| Lewis X | Lewis x (2) | 83 |
| Sialyl Lewis X | Sialyl x | 85 |
| Complement C1q | C1q | 91 |
| Complement C5 | C5 (2) | 97 |
| Plasma protease C1 | C1 inh. (1) | 98 |
| inhibitor | | |
| Properdin | Properdin | 109 |
| Vascular endothelial | VEGF (3) | 112 |
| growth factor | | |
| Interleukin-4 | IL-4 (3) | 114 |
| Intercellular adhesion | ICAM-1 | 121 |
| molecule 1 | | |
| Apolipoprotein A1 | Apo-A1 (2) | 132 |
| Apolipoprotein A1 | Apo-A1 (3) | 133 |
| Plasma protease C1 | C1 inh. (2) | 135 |
| inhibitor | | |
| Plasma protease C1 | C1 inh. (3) | 136 |
| inhibitor | | |
| Complement C4 | C4 (3) | 138 |
| Complement C3 | C3 (3) | 140 |
| Myomesin-2 | MYOM2 (2) | 143 |
| Visual system homeobox 2 | CHX10 (3) | 146 |
| Cyclin-dependent kinase 2 | CDK-2 (2) | 164 |
| HADH2 protein | HADH2 (3) | 171 |
| Protein-tyrosine kinase 6 | PTK6 | 188 |
| Calcineurin B homologous | CHP1 (2) | 210 |
| protein 1 | | |
| Aprataxin and PNK-like | APLF (2) | 261 |
| factor | | |
| Disks large homolog 1 | DLG1-1 (2) | 268 |
| Calcium/calmodulin- | KCC4 (1) | 283 |
| dependent protein kinase | | |
| type IV | | |
| Membrane-associated | MAGI1-1 (1) | 291 |
| guanylate kinase, WW and | | |
| PDZ domain-containing | | |
| protein 1 | | |
| Serine/threonine-protein | MARK1-1 (2) | 292 |
| kinase MARK1 | | |
| PR domain zinc finger | PRDM8-1 (1) | 305 |
| protein 8 | | |
| Protein kinase C zeta type | PRKCZ (2) | 319 |

The application's sequence listing, which the Patent Office published only in electronic form, follows.

SEQUENCE LISTING (329 sequences)

SEQ ID NO: 1 - protein, 261 aa, Artificial Sequence
  IL-1a (1) scFv antibody
  VARIANT 193: Any amino acid
  VARIANT 239: Any amino acid
  VARIANT 253..255: Any amino acid
EVQLLESGGGLVQPGGSLRLSCAASGFTFSSYAMHWVRQAPGKGLEWVSGVSWNGSRTHYADSVKGRFTISRDNSKNTLYLQMNSLRAEDTAVYYCARSSGYYSWAFDIWGQGTLVTVSSGGGGSGGGGSGGGGSQSVLTQPPSASGTPGQRVTISCSGSSSNIGRNTVNWYQQLPGTAPKLLIYGNSNRPSXVPDRFSGSKSGTSASLAISGLRSEDEADYYCAAWDDSLNGWAFGGXTKLTVLGEQKLISXXXLSGSAA

SEQ ID NO: 2 - protein, 264 aa, Artificial Sequence
  IL-1a (2) scFv antibody
  VARIANT 222: Any amino acid
  VARIANT 242: Any amino acid
EVQLLESGGGLVQPGGSLRLSCAASGFTFSSYSMNWVRQAPGKGLEWVALISYDGSQKYYADSMKGRFTISRDNSKNTLYLQMNSLRAEDTAVYYCAKGHTSGTKAYYFDSWGQGTLVTVSSGGGGSGGGGSGGGGSQSVLTQPPSASGTPGQRVTISCTGTSSNIGAGYSVHWYQQLPGTAPKLLIYGNSNRPSGVPDRFSGSKSGTSASLAISGLRSEDXADYYCQSYDSSLSGWVFGGXTKLTVLGEQKLISEEDLSGSAA

SEQ ID NO: 3 - protein, 260 aa, Artificial Sequence
  IL-2 (1) scFv antibody
  VARIANT 238: Any amino acid
  VARIANT 243: Any amino acid
  VARIANT 252..253: Any amino acid
EVQLLESGGGLVQPGGSLRLSCAASGFTFGDYAMSWVRQAPGKGLEWVSSISSRGSYIYFADSVKGRFTISRDNSKNTLYLQMNSLRAEDTAVYYCAKKKTGYYGLDAWGQGTLVTVSSGGGGSGGGGSGGGGSQSVLTQPPSASGTPGQRVTISCTGSSSNIGAGYDVHWYQQLPGTAPKLLIYGNSNRPSGVPDRFSGSKSGTSASLAISGLRSEDEADYYCSSYAGSNNLVFGGXTKLTXLGEQKLISXXDLSGSAA

SEQ ID NO: 4 - protein, 260 aa, Artificial Sequence
  IL-2 (2) scFv antibody
  VARIANT 3..4: Any amino acid
  VARIANT 238..239: Any amino acid
  VARIANT 253..254: Any amino acid
EVXXLESGGGLVQPGGSLRLSCAASGFTFGDYAMSWVRQAPGKGLEWVSSISSRGSYIYFADSVKGRFTISRDNSKNTLYLQMNSLRAEDTAVYYCAKKKTGYYGLDAWGQGTLVTVSSGGGGSGGGGSGGGGSQSVLTQPPSASGTPGQRVTISCTGSSSNIGAGYDVHWYQQLPGTAPKLLIYGNSNRPSGVPDRFSGSKSGTSASLAISGLRSEDEADYYCSSYAGSNNLVFGGXXKLTVLGEQKLISEXXLSGSAA

SEQ ID NO: 5 - protein, 191 aa, Artificial Sequence
  IL-2 (3) scFv antibody
  VARIANT 162: Any amino acid
EVQLLESGGGLVQPGGSLRLSCAASGFTFGDYAMSWVRQAPGKGLEWVSSISSRGSYIYFADSVKGRFTISRDNSKNTLYLQMNSLRAEDTAVYYCAKKKTGYYGLDAWGQGTLVTVSSGGGGSGGGGSGGGGSQSVLTQPPSASGTPGQRVTISCTGSSSXIGAGYDVHWYQQLPGTAPKLLIYGNSNRP

SEQ ID NO: 6 - protein, 262 aa, Artificial Sequence
  IL-3 (1) scFv antibody
  VARIANT 220: Any amino acid
  VARIANT 240..241: Any amino acid
  VARIANT 254..256: Any amino acid
  VARIANT 260: Any amino acid
EVQLLESGGGLVQPGGSLRLSCAASGFTFGRYTMHWVRQAPGKGLEWVSSISSSSSYIYYADSVKGRFTISRDNSKNTLYLQMNSLRAEDTAVYYCARHFFESSGGYFDYWGQGTLVTVSSGGGGSGGGGSGGGGSQSVLTQPPSASGTPGQRVTISCSGSSSNIGSNTVNWYQQLPGTAPKLLIYRNNQRPSGVPDRFSGSKSGTSASLAISGLRSEDXADYYCAAWDDSLNGWVFGGXXKLTVLGEQKLISXXXLSGXAA

SEQ ID NO: 7 - protein, 257 aa, Artificial Sequence
  IL-3 (2) scFv antibody
  VARIANT 242: Any amino acid
  VARIANT 250: Any amino acid
EVQLLESGGGLVQPGGSLRLSCAASGFTFSSYAMSWVRQAPGKGLEWVSAISGSGGSTYYADSVKGRFTISRDNSKNTLYLQMNSLRAEDTAVYYCARGGARYDYWGQGTLVTVSSGGGGSGGGGSGGGGSQSVLTQPPSASGTPGQRVTISCSGSSSNIGSNTVNWYQQLPGTAPKLLIYDNNKRPSGVPDRFSGSKSGTSASLAISGLRSEDEADYYCQSYDNILRGVVFGGGTKLTVLXEQKLISEXDLSGSAA

SEQ ID NO: 8 - protein, 258 aa, Artificial Sequence
  IL-3 (3) scFv antibody
  VARIANT 3..5: Any amino acid
  VARIANT 204: Any amino acid
  VARIANT 236: Any amino acid
  VARIANT 250..251: Any amino acid
EVXXXESGGGLVQPGGSLRLSCAASGFTFSSYAMSWVRQAPGKGLEWVSAISGRGEYTYYAGSVKGRFTISRDNSKNTLYLQMNSLRAEDTAVYYCATGATRFGYWGQGTLVTVSSGGGGSGGGGSGGGGSQSVLTQPPSASGTPGQRVTISCTGSSSNIGAGYGVQWYQQLPGTAPKLLIYRNNQRPSGVPDRFSGSKSGTSXSLAISGLRSEDEADYYCQSYDSSLSYSVFGGXTKLTVLGEQKLISXXDLSGSAA

SEQ ID NO: 9 - protein, 264 aa, Artificial Sequence
  IL-4 (1) scFv antibody
  VARIANT 242: Any amino acid
  VARIANT 256: Any amino acid
  VARIANT 258: Any amino acid
EVQLLESGGGLVQPGGSLRLSCAASGFTFSNAWMSWVRQAPGKGLEWVSSLHGGGDTFYTDSVKGRFTISRDNSKNTLYLQMNSLRAEDTAVYYCASLYGSGSYYYYYYGMDVWGQGTLVTVSSGGGGSGGGGSGGGGSQSVLTQPPSASGTPGQRVTISCSGNNSNTGNNAVNWYQQLPGTAPKLLIYDNNKRPSGVPDRFSGSKSGTSASLAISGLRSEDEADYYCCSYAGSYIWVFGGXTKLTVLGEQKLISXEXLSGSAA

SEQ ID NO: 10 - protein, 266 aa, Artificial Sequence
  IL-4 (2) scFv antibody
  VARIANT 244: Any amino acid
  VARIANT 248: Any amino acid
  VARIANT 251: Any amino acid
  VARIANT 258..259: Any amino acid
EVQLLESGGGLVQPGGSLRLSCAASGFTFSDYGMHWVRQAPGKGLEWVSGISWNGGKTHYVDSVKGQFTISRDNSKNTLYLQMNSLRAEDTAVYYCARDRGYCSNGVCYTILDYWGQGTLVTVSSGGGGSGGGGSGGGGSQSVLTQPPSASGTPGQRVTISCSGSSSNIGSNTINWYQQLPGTAPKLLIYGNSNRPSGVPDRFSGSKSGTSASLAISGLRSEDEADYYCQSYDSSLSGWVFGGXTKLXVLXEQKLISXXDLSGSAA

SEQ ID NO: 11 - protein, 187 aa, Artificial Sequence
  IL-5 (1) scFv antibody
  VARIANT 159: Any amino acid
EVQLLESGGGLVQPGGSLRLSCAASGFTFSSYAMSWVRQAPGKGLEWVSSISSRSNYIYYSDSVKGRFTISRDNSKNTLYLQMNSLRAEDTAVYYCARNFRFFDKWGQGTLVTVSSGGGGSGGGGSGGGGSQSVLTQPPSASGTPGQRVTISCSGGSSXIGANPVSWYQQLPGTAPKLLIYGNSNRP

SEQ ID NO: 12 - protein, 257 aa, Artificial Sequence
  IL-5 (2) scFv antibody
  VARIANT 235: Any amino acid
  VARIANT 242: Any amino acid
  VARIANT 250..251: Any amino acid
EVQLLESGGGLVQPGGSLRLSCAASGFTFSSYAMSWVRQAPGKGLEWVSSISSRSNYIYYSDSVKGRFTISRDNSKNTLYLQMNSLRAEDTAVYYCARNFRFFDKWGQGTLVTVSSGGGGSGGGGSGGGGSQSVLTQPPSASGTPGQRVTISCSGGSSNIGANPVSWYQQLPGTAPKLLIYGNSNRPSGVPDRFSGSKSGTSASLAISGLRSEDEADYYCQSYDSSLSGSVFGGXTKLTVLXEQKLISEXXLSGSAA

SEQ ID NO: 13 - protein, 257 aa, Artificial Sequence
  IL-5 (3) scFv antibody
  VARIANT 235: Any amino acid
  VARIANT 249: Any amino acid
EVQLLESGGGLVQPGGSLRLSCAASGFTFSSYAMSWVRQAPGKGLEWVSSISSRSNYIYYSDSVKGRFTISRDNSKNTLYLQMNSLRAEDTAVYYCARNFRFFDKWGQGTLVTVSSGGGGSGGGGSGGGGSQSVLTQPPSASGTPGQRVTISCSGGSSNIGANPVSWYQQLPGTAPKLLIYGNSNRPSGVPDRFSGSKSGTSASLAISGLRSEDEADYYCQSYDSSLSGSVFGGXTKLTVLGEQKLISXEDLSGSAA

SEQ ID NO: 14 - protein, 297 aa, Artificial Sequence
  IL-6 (1) scFv antibody
  VARIANT 203: Any amino acid
  VARIANT 208: Any amino acid
  VARIANT 213: Any amino acid
  VARIANT 218: Any amino acid
  VARIANT 220: Any amino acid
  VARIANT 226..227: Any amino acid
  VARIANT 234..236: Any amino acid
  VARIANT 240: Any amino acid
  VARIANT 242: Any amino acid
  VARIANT 247..248: Any amino acid
  VARIANT 254..256: Any amino acid
  VARIANT 261..263: Any amino acid
  VARIANT 268..269: Any amino acid
  VARIANT 272..273: Any amino acid
  VARIANT 275..278: Any amino acid
  VARIANT 280..282: Any amino acid
  VARIANT 284: Any amino acid
  VARIANT 289: Any amino acid
  VARIANT 291: Any amino acid
  VARIANT 293: Any amino acid
  VARIANT 295..297: Any amino acid
EVQLLESGGGLVQPGGSLRLSCAASGFTFSSYGMHWVRQAPGKGLEWVSGINWNGGSTGYADSVKGRFTISRDNSKNTLYLQMNSLRAEDTAVYYCARNRGSSLYYGMDVWGQGTLVTVSSGGGGSGGGGSGGGGSQSVLTQPPSASGTPGQRVTISCAGSSSNIGSKSVHWYQQLPGTAPKLLIYRNNRRPSGVPDRFSGSXSGTSXSLAIXGLRSXDXADYYCXXWDDRVNXXXFGGXTXLTVLXXQKLISXXXLSGSXXXPSSSXXLIXXGXXXXLXXXLXFTGRXFXTXLXXX

SEQ ID NO: 15 - protein, 260 aa, Artificial Sequence
  IL-6 (2) scFv antibody
  VARIANT 238: Any amino acid
  VARIANT 248: Any amino acid
  VARIANT 254: Any amino acid
EVQLLESGGGLVQPGGSLRLSCAASGFTFSNYGMHWVRQAPGKGLEWVSSITSSGDGTYFADSVKGRFTISRDNSKNTLYLQMNSLRAEDTAVYYCARAGGIAAAYAFDIWGQGTLVTVSSGGGGSGGGGSGGGGSQSVLTQPPSASGTPGQRVTISCSGSSSNVGSNYVYWYQQLPGTAPKLLIYDNNKRPSGVPDRFSGSKSGTSASLAISGLRSEDEADYYCQSYDSSRWVFGGXTKLTVLGEQXLISEEXLSGSAA

SEQ ID NO: 16 - protein, 269 aa, Artificial Sequence
  IL-7 (1) scFv antibody
  VARIANT 226..227: Any amino acid
  VARIANT 247..248: Any amino acid
  VARIANT 251: Any amino acid
  VARIANT 262..263: Any amino acid
EVQLLESGGGLVQPGGSLRLSCAASGFTFSSYGMHWVRQAPGKGLEWVSGITWNSGSIGYVDSVKGRFTISRDNSKNTLYLQMNSLRAEDTAVYYCARGPSVAARRIGRHWYNWFDPWGQGTLVTVSSGGGGSGGGGSGGGGSQSVLTQPPSASGTPGQRVTISCSGSSSNIGSNSVYWYQQLPGTAPKLLIYDNNKRPSGVPDRFSGSKSGTSASLAISGLRSEXXADYYCQSYDSSLSGSVFGGXXKLXVLGEQKLISEXXLSGSAA

SEQ ID NO: 17 - protein, 256 aa, Artificial Sequence
  IL-7 (2) scFv antibody
  VARIANT 226..227: Any amino acid
  VARIANT 247: Any amino acid
EVQLLESGGGLVQPGGSLRLSCAASGFTFSDYNIHWVRQPPGKGLEWVSGVSWNGSRTHYADSVKGQFTISRDNSKNTLYLQMNSLRAEDTAVYYCARDPAMVRGVVLPNYYGLDVWGQGTLVTVSSGGGGSGGGGSGGGGSQSVLTQPPSASGTPGQRVTISCTGSSSNIGAGYDVHWYQQLPGTAPKLLIYGHSNRPSGVPDRFSGSKSGTSASLAISGLRSEXXADYYCQSYDSSLSYPVFGGXTKLTVLGEQ

SEQ ID NO: 18 - protein, 259 aa, Artificial Sequence
  IL-8 (1) scFv antibody
  VARIANT 191: Any amino acid
  VARIANT 237: Any amino acid
  VARIANT 244: Any amino acid
  VARIANT 252..253: Any amino acid
EVQLLESGGGLVQPGGSLRLSCAASGFTFDDYGMSWVRQAPGKGLEWVSLISWDGGSTYYADSVKGRFTISRDNSKNTLYLQMNSLRAEDTAVYYCARDDLYGMDVWGQGTLVTVSSGGGGSGGGGSGGGGSQSVLTQPPSASGTPGQRVTISCTGSSSNIGAGYDVHWYQQLPGTAPKLLIYDNNKRPSXVPDRFSGSKSGTSASLAISGLRSEDEADYYCAAWDDSLSGWVFGGXTKLTVLXEQKLISEXXLSGSAA

SEQ ID NO: 19 - protein, 265 aa, Artificial Sequence
  IL-8 (2) scFv antibody
  VARIANT 243: Any amino acid
  VARIANT 250: Any amino acid
  VARIANT 257..259: Any amino acid
EVQLLESGGGLVQPGGSLRLSCAASGFTFSSYEMNWVRQAPGKGLEWVSSISSSSSYIFYADSMKGRFTISRDNSKNTLYLQMNSLRAEDTAVYYCARNESVDPLGGQYFQHWGQGTLVTVSSGGGGSGGGGSGGGGSQSVLTQPPSASGTPGQRVTISCTGSSSNIGAGYDVHWYQQLPGTAPKLLIYDNNKRPSGVPDRFSGSKSGTSASLAISGLRSEDEADYYCSAWDDNLDGPVFGGXTKLTVLXEQKLISXXXLSGSAA

SEQ ID NO: 20 - protein, 251 aa, Artificial Sequence
  IL-9 (1) scFv antibody
  VARIANT 229: Any amino acid
  VARIANT 236: Any amino acid
  VARIANT 244: Any amino acid
EVQLLESGGGLVQPGGSLRLSCAASGFTFSSYAMSWVRQAPGKGLEWVSSISSSSSYIYYADSVKGRFTISRDNSKNTLYLQMNSLRAEDTAVYYCTTFGHWGQGTLVTVSSGGGGSGGGGSGGGGSQSVLTQPPSASGTPGQRVTISCSGSGSNIGDNSVNWYQQLPGTAPKLLIYGNNNRPSGVPDRFSGSKSGTSASLAISGLRSEDEADYYCSSYTSSSVVFGGXTKLTVLXEQKLISEXDLSGSAA

SEQ ID NO: 21 - protein, 192 aa, Artificial Sequence
  IL-9 (2) scFv antibody
EVQLLESGGGLVQPGGSLRLSCAASGFTFSSYGMHWVRQAPGKGLEWVAVISYDGSNKYYADSVKGRFTISRDNSKNTLYLQMNSLRAEDTAVYYCAKSPGGSPYYFDYWGQGTLVTVSSGGGGSGGGGSGGGGSQSVLTQPPSASGTPGQRVTISCSGSVSNIGSNVVSWYQQLPGTAPKLLIYDNNKRPS

SEQ ID NO: 22 - protein, 261 aa, Artificial Sequence
  IL-9 (3) scFv antibody
  VARIANT 239: Any amino acid
  VARIANT 254: Any amino acid
EVQLLESGGGLVQPGGSLRLSCAASGFTFSSYGMHWVRQAPGKGLEWVAVISYDGSNKYYADSVKGRFTISRDNSKNTLYLQMNSLRAEDTAVYYCAKSPGGSPYYFDYWGQGTLVTVSSGGGGSGGGGSGGGGSQSVLTQPPSASGTPGQRVTISCSGSVSNIGSNVVSWYQQLPGTAPKLLIYDNNKRPSGVPDRFSGSKSGTSASLAISGLRSEDEADYYCQSYDSSLGGWVFGGXTKLTVLGEQKLISEXDLSGSAA

SEQ ID NO: 23 - protein, 261 aa, Artificial Sequence
  IL-10 (1) scFv antibody
  VARIANT 216: Any amino acid
  VARIANT 218: Any amino acid
  VARIANT 239: Any amino acid
  VARIANT 253..254: Any amino acid
EVQLLESGGGLVQPGGSLRLSCAASGFTFRSYVMSWVRQAPGKGLEWVSAISGSGGSTYYADSVKGRFTISRDNSKNTLYLQMNSLRAEDTAVYYCARGKGRWAFDIWGQGTLVTVSSGGGGSGGGGSGGGGSQSVLTQPPSASGTPGQRVTISCTGSSSNVGAGYDVHWYQQLPGTAPKLLIYRNNQRPSGVPDRFSGSKSGTSASLAISGLRSXDXADYYCAAWDDSLSAHVVFGGXTKLTVLGEQKLISXXDLSGSAA

SEQ ID NO: 24 - protein, 261 aa, Artificial Sequence
  IL-10 (2) scFv antibody
  VARIANT 239: Any amino acid
  VARIANT 254: Any amino acid
EVQLLESGGGLVQPGGSLRLSCAASGFTFRSYVMSWVRQAPGKGLEWVSAISGSGGSTYYADSVKGRFTISRDNSKNTLYLQMNSLRAEDTAVYYCARGKGRWAFDIWGQGTLVTVSSGGGGSGGGGSGGGGSQSVLTQPPSASGTPGQRVTISCTGSSSNVGAGYDVHWYQQLPGTAPKLLIYRNNQRPSGVPDRFSGSKSGTSASLAISGLRSEDEADYYCAAWDDSLSAHVVFGGXTKLTVLGEQKLISEXDLSGSAA

SEQ ID NO: 25 - protein, 260 aa, Artificial Sequence
  IL-10 (3) scFv antibody
  VARIANT 218: Any amino acid
  VARIANT 238: Any amino acid
  VARIANT 245: Any amino acid
  VARIANT 253..254: Any amino acid
EVQLLESGGGLVQPGGSLRLSCAASGFTFSSYAMSWVRQAPGKGLEWVSAISGSGGSTYYADSVKGRFTISRDNSKNTLYLQMNSLRAEDTAVYYCARGKGRWAFDIWGQGTLVTVSSGGGGSGGGGSGGGGSQSVLTQPPSASGTPGQRVTISCTGSSSNIGAGYGVHWYQQLPGTAPKLLIYGNSNRPSGVPDRFSGSKSGTSASLAISGLRSEDXADYYCAAWDDSLSGLVFGGXTKLTVLXEQKLISEXXLSGSAA

SEQ ID NO: 26 - protein, 262 aa, Artificial Sequence
  IL-11 (1) scFv antibody
  VARIANT 231: Any amino acid
  VARIANT 240: Any amino acid
  VARIANT 254: Any amino acid
  VARIANT 256: Any amino acid
EVQLLESGGGLVQPGGSLRLSCAASGFTFSNFGMHWVRQAPGKGLEWVAFIRYDGSNKYYADSVKGRFTISRDNSKNTLYLQMNSLRAEDTAVYYCARHYYYSETSGHPGGFDPWGQGTLVTVSSGGGGSGGGGSGGGGSQSVLTQPPSASGTPGQRVTISCSGSSSNIGSYPVNWYQQLPGTAPKLLIYGNSNRPSGVPDRFSGSKSGTSASLAISGLRSEDEADYYCQXWGTGVFGGXTKLTVLGEQKLISXEXLSGSAA

SEQ ID NO: 27 - protein, 267 aa, Artificial Sequence
  IL-11 (2) scFv antibody
  VARIANT 208: Any amino acid
  VARIANT 245: Any amino acid
  VARIANT 260..261: Any amino acid
EVQLLESGGGLVQPGGSLRLSCAASGFTFSSYGMHWVRQAPGKGLEWVAVISYDGSNKYYADSVKGRFTISRDNSKNTLYLQMNSLRAEDTAVYYCARHYYDVSYRGQQDAFDIWGQGTLVTVSSGGGGSGGGGSGGGGSQSVLTQPPSASGTPGQRVTISCTGSSSNLGSPYDVHWYQQLPGTAPKLLIYRNDQRASGVPDRFSGSXSGTSASLAISGLRSEDEADYYCAAWDDSLNAWVFGGXTKLTVLGEQKLISEXXLSGSAA

SEQ ID NO: 28 - protein, 263 aa, Artificial Sequence
  IL-11 (3) scFv antibody
  VARIANT 241: Any amino acid
EVQLLESGGGLVQPGGSLRLSCAASGFTFSDYYMSWIRQAPGKGLEWVAYISGISGYTNYADSVRGRFTISRDNSKNTLYLQMNSLRAEDTAVYYCAKSKDWVNGGEMDVWGQGTLVTVSSGGGGSGGGGSGGGGSQSVLTQPPSASGTPGQRVTISCTGSSSNIGAGYVVHWYQQLPGTAPKLLIYSNNQRPSGVPDRFSGSKSGTSASLAISGLRSEDEADYYCAAWDDSLRGWVFGGXTKLTVLGEQKLISEEDLSGSAA

SEQ ID NO: 29 - protein, 256 aa, Artificial Sequence
  IL-12 (1) scFv antibody
  VARIANT 234: Any amino acid
  VARIANT 249: Any amino acid
EVQLLESGGGLVQPGGSLRLSCAASGFTFSSYSMNWVRQAPGKGLEWVSAIGTGGGTYYADSVKGRFTISRDNSKNTLYLQMNSLRAEDTAVYYCARAFRAFDIWGQGTLVTVSSGGGGSGGGGSGGGGSQSVLTQPPSASGTPGQRVTISCSGSRSNIGNNFVSWYQQLPGTAPKLLIYGNSNRPSGVPDRFSGSKSGTSASLAISGLRSEDEADYYCAAWDDSLSGPVFGGXTKLTVLGEQKLISEXDLSGSAA

SEQ ID NO: 30 - protein, 262 aa, Artificial Sequence
  IL-12 (2) scFv antibody
  VARIANT 255..256: Any amino acid
EVQLLESGGGLVQPGGSLRLSCAASGFTFSDYYMSWVRQAPGKGLEWVSGVSWNGSRTHYADSVKGQFTISRDNSKNTLYLQMNSLRAEDTAVYYCARGSRSSPDAFDIWGQGTLVTVSSGGGGSGGGGSGGGGSQSVLTQPPSASGTPGQRVTISCTGSSSNIGAGYDVHWYQQLPGTAPKLLIYGNSNRPSGVPDRFSGSKSGTSASLAISGLRSEDEADYYCAAWDDRVNGRVFGGGTKLTVLGEQKLISEXXLSGSAA

SEQ ID NO: 31 - protein, 231 aa, Artificial Sequence
  IL-13 (1) scFv antibody
EVQLLESGGGLVQPGGSLRLSCAASGFTFSSYSMNWVRQAPGKGLEWVSSISSGSSYIYYADSVKGRFTISRDNSKNTLYLQMNSLRAEDTAVYYCARSQGWWTYYYGMDVWGQGTLVTVSSGGGGSGGGGSGGGGSQSVLTQPPSASGTPGQRVTISCSGSSSNIGSNTVNWYQQLPGTAPKLLIYSNNQRPSGVPDRFSGSKSGTSASLAISGLRSEDEADYYCETWGQ

SEQ ID NO: 32 - protein, 317 aa, Artificial Sequence
  IL-13 (2)
  VARIANT 221: Any amino acid
  VARIANT 229: Any amino acid
  VARIANT 239: Any amino acid
  VARIANT 255: Any amino acid
  VARIANT 261: Any amino acid
  VARIANT 270: Any amino acid
  VARIANT 272: Any amino acid
  VARIANT 275..276: Any amino acid
  VARIANT 280: Any amino acid
  VARIANT 285..286: Any amino acid
  VARIANT 289: Any amino acid
  VARIANT 296..297: Any amino acid
  VARIANT 301..303: Any amino acid
  VARIANT 310..312: Any amino acid
  VARIANT 314..317: Any amino acid
EVQLLESGGGLVQPGGSLRLSCAASGFTFSSYSMNWVRQAPGKGLEWVSSISSGSSYIYYADSVKGRFTISRDNSKNTLYLQMNSLRAEDTAVYYCARSQGWWTYYYGMDVWGQGTLVTVSSGGGGSGGGGSGGGGSQSVLTQPPSASGTPGQRVTISCSGSSSNIGSNTVNWYQQLPGTAPKLLIYSNNQRPSGVPDRFSGSKSGTSASLAISGLRSEDXADYYCETXDSNTQIFGGXTKLTVLGEQKLISEEXLSGSAXAHHHHHHSXRXPIXXIVSXITIHXXSFXNVVTGKXXALPXXXALQHIPXXXAXXXX

SEQ ID NO: 33 - protein, 261 aa, Artificial Sequence
  IL-13 (3) scFv antibody
  VARIANT 239: Any amino acid
  VARIANT 254: Any amino acid
EVQLLESGGGLVQPGGSLRLSCAASGFTFSSYSMNWVRQAPGKGLEWVSSISSGSSYIYYADSVKGRFTISRDNSKNTLYLQMNSLRAEDTAVYYCARSQGWWTYYYGMDVWGQGTLVTVSSGGGGSGGGGSGGGGSQSVLTQPPSASGTPGQRVTISCSGSSSNIGSNTVNWYQQLPGTAPKLLIYSNNQRPSGVPDRFSGSKSGTSASLAISGLRSEDEADYYCETWDSNTQIFGGXTKLTVLGEQKLISEXDLSGSAA

SEQ ID NO: 34 - protein, 262 aa, Artificial Sequence
  VEGF (1) scFv antibody
  VARIANT 203: Any amino acid
  VARIANT 240: Any amino acid
  VARIANT 255: Any amino acid
EVQLLESGGGLVQPGGSLRLSCAASGFTFSSNEMSWIRQAPGKGLEWVSSISGSGGFTYYADSVKGRYTISRDNSKNTLYLQMNSLRAEDTAVYYCARETTVRGNAFDIWGQGTLVTVSSGGGGSGGGGSGGGGSQSVLTQPPSASGTPGQRVTISCTGGSSNIGAGYDVHWYQQLPGTAPKLLIYRNNQRPSGVPDRFSGSXSGTSASLAISGLRSEDEADYYCAAWDDSLSVPMFGGXTKLTVLGEQKLISEXDLSGSAA

SEQ ID NO: 35 - protein, 265 aa, Artificial Sequence
  VEGF (2) scFv antibody
  VARIANT 197: Any amino acid
  VARIANT 206: Any amino acid
  VARIANT 222: Any amino acid
  VARIANT 243: Any amino acid
  VARIANT 252: Any amino acid
  VARIANT 258..259: Any amino acid
EVQLLESGGGLVQPGGSLRLSCAASGFTFSSYSMNWVRQAPGKGLEWVSGINWNGGSTGYADSVKGRFTISRDNSKNTLYLQMNSLRAEDTAVYYCASSVGGWYEGDNWFDPWGQGTLVTVSSGGGGSGGGGSGGGGSQSVLTQPPSASGTPGQRVTISCTGSSSNIGAGYDVHWYQQLPGTAPKLLIYGNSNRPSXVPDRFSGSXSGTSASLAISGLRSEXEADYYCQSYDGSLSGSVFGGXTKLTVLGEXKLISEXXLSGSAA

SEQ ID NO: 36 - protein, 260 aa, Artificial Sequence
  TGF-?1 (1) scFv antibody
  VARIANT 238: Any amino acid
  VARIANT 242: Any amino acid
EVQLLESGGGLVQPGGSLRLSCAASGFTFSTYAMSWVRQAPGKGLEWVAVVSIDGGTTYYGDPVKGRFTISRDNSKNTLYLQMNSLRAEDTAVYYCTRGPTLTYYFDYWGQGTLVTVSSGGGGSGGGGSGGGGSQSVLTQPPSASGTPGQRVTISCSGSSSNIGSNTVNWYQQLPGTAPKLLIYSNNQRPSGVPDRFSGSKSGTSASLAISGLRSEDEADYYCQSYDSSLSGWVFGGXTKLXVLGEQKLISEEDLSGSAA

SEQ ID NO: 37 - protein, 259 aa, Artificial Sequence
  TGF-?1 (2) scFv antibody
  VARIANT 241: Any amino acid
  VARIANT 252: Any amino acid
EVQLLESGGGLVQPGGSLRLSCAASGFTFGDYAMSWFRQAPGKGLEWVSGVSWNGSRTHYADSVKGRFTISRDNSKNTLYLQMNSLRAEDTAVYYCARDGNRPLDYWGQGTLVTVSSGGGGSGGGGSGGGGSQSVLTQPPSASGTPGQRVTISCTGSSSNIGAGYDVHWYQQLPGTAPKLLIYGNSNRPSGVPDRFSGSKSGTSASLAISGLRSEDEADYYCAAWDDRLNGWVFGGGTKLXVLGEQKLISEXDLSGSAA

SEQ ID NO: 38 - protein, 267 aa, Artificial Sequence
  TGF-?1 (3) scFv antibody
  VARIANT 225: Any amino acid
  VARIANT 245: Any amino acid
  VARIANT 259..261: Any amino acid
EVQLLESGGGLVQPGGSLRLSCAASGFTFSDYYIGWIRQAPGKGLEWVSGINWNGGSTGYADSVKGRFTISRDNSKNTLYLQMNSLRAEDTAVYYCARRSTPSSSWALPDFFDYWGQGTLVTVSSGGGGSGGGGSGGGGSQSVLTQPPSASGTPGQRVTISCTGSSSNIGANYDVHWYQQLPGTAPKLLIYSNNQRPSGVPDRFSGSKSGTSASLAISGLRSEDXADYYCQSYDSSLSGWVFGGXTKLTVLGEQKLISXXXLSGSAA

SEQ ID NO: 39 - protein, 267 aa, Artificial Sequence
  TNF-? (1) scFv antibody
  VARIANT 232: Any amino acid
  VARIANT 243: Any amino acid
  VARIANT 264: Any amino acid
EVQLLESGGGLVQPGGSLRLSCAASGFTFYSSGMYWVRQAPGKGLEWVSAISGSGGSTYYADSVKGRFTISRDNSKNTLYLQMNSLRAEDTAVYYCARHGYSYSFDYWGQGTLVTVSSGGGGSGGGGSGGGGSDIQMTQSPSSLSASVGDRVTITCRASQSISSYLNWYQQKPGKAPKLLIYAASSLQSGVPSRFSGSGSGTDFTLTISSLQPEDFATYYCQQGVFYPHTFXQGTKLEIKRLXDYKDHDGDYKDHDIDYKDDDXKAA

SEQ ID NO: 40 - protein, 307 aa, Artificial Sequence
  TNF-? (2) scFv antibody
  VARIANT 249: Any amino acid
  VARIANT 256: Any amino acid
  VARIANT 266..269: Any amino acid
  VARIANT 271: Any amino acid
  VARIANT 274: Any amino acid
  VARIANT 285..287: Any amino acid
  VARIANT 292: Any amino acid
  VARIANT 297..300: Any amino acid
  VARIANT 302..307: Any amino acid
EVQLLESGGGLVQPGGSLRLSCAASGFTFSSYAMSWVRQAPGKGLEWVSAISGSGGSTYYADSVKGRFTISRDNSKNTLYLQMNSLRAEDTAVYYCARYVSHYTAHWYAYFDYWGQGTLVTVSSGGGGSGGGGSGGGGSDIQMTQSPSSLSASVGDRVTITCRASQSISSYLNWYQQKPGKAPKLLIYAASSLQSGVPSRFSGSGSGTDFTLTISSLQPEDFATYYCQQAGYHPLTFGQGTKLEIKRLXDYKDHDXDYKDHDIDYXXXXDXAAXHHHHHHSPRWXXXFALVXLRALXXXXFXXXXXX

SEQ ID NO: 41 - protein, 263 aa, Artificial Sequence
  TNF-? (3) scFv antibody
  VARIANT 239..240: Any amino acid
EVQLLESGGGLVQPGGSLRLSCAASGFTFGSYSMSWVRQAPGKGLEWVSSISSYYGGTSYADSVKGRFTISRDNSKNTLYLQMNSLRAEDTAVYYCARGAYLDYWGQGTLVTVSSGGGGSGGGGSGGGGSDIQMTQSPSSLSASVGDRVTITCRASQSISSYLNWYQQKPGKAPKLLIYAASSLQSGVPSRFSGSGSGTDFTLTISSLQPEDFATYYCQQYYFPFTFGQGTKLEIKRLXXYKDHDGDYKDHDIDYKDDDDKAA

SEQ ID NO: 42 - protein, 261 aa, Artificial Sequence
  GM-CSF (1) scFv antibody
  VARIANT 197: Any amino acid
  VARIANT 239: Any amino acid
  VARIANT 254..255: Any amino acid
EVQLLESGGGLVQPGGSLRLSCAASGFTFSSYGMHWVRQAPGKGLEWVAVISYDGSNKYYADSVKGRFTISRDNSKNTLYLQMNSLRAEDTAVYYCARVGGMSAPVDYWGQGTLVTVSSGGGGSGGGGSGGGGSQSVLTQPPSASGTPGQRVTISCSGSSSNIGSNTVNWYQQLPGTAPKLLIYDNNKRPSGVPDRXSGSKSGTSASLAISGLRSEDEADYYCAAWDDSLIGLVVFGGXTKLTVLGEQKLISEXXLSGSAA

SEQ ID NO: 43 - protein, 260 aa, Artificial Sequence
  GM-CSF (2) scFv antibody
  VARIANT 193: Any amino acid
  VARIANT 238: Any amino acid
  VARIANT 242: Any amino acid
  VARIANT 252: Any amino acid
EVQLLESGGGLVQPGGSLRLSCAASGFTFSSYAMSWVRQAPGKGLEWVAVISYDGSNEDSADSVKGRFTISRDNSKNTLYLQMNSLRAEDTAVYYCARGPSLRGVSDYWGQGTLVTVSSGGGGSGGGGSGGGGSQSVLTQPPSASGTPGQRVTISCTGSSSNIGAGYDVHWYQQLPGTAPKLLIYNDNQRPSXVPDRFSGSKSGTSASLAISGLRSEDEADYYCQTWGTGINVIFGGXTKLXVLGEQKLISXEDLSGSAA

SEQ ID NO: 44 - protein, 260 aa, Artificial Sequence
  GM-CSF (3) scFv antibody
  VARIANT 219: Any amino acid
  VARIANT 238: Any amino acid
  VARIANT 247: Any amino acid
  VARIANT 253..254: Any amino acid
EVQLLESGGGLVQPGGSLRLSCAASGFTFSSYAMSWVRQAPGKGLEWVAVISYDGSNEDSADSVKGRFTISRDNSKNTLYLQMNSLRAEDTAVYYCARGPSLRGVSDYWGQGTLVTVSSGGGGSGGGGSGGGGSQSVLTQPPSASGTPGQRVTISCTGSSSNIGAGYDVHWYQQLPGTAPKLLIYNDNQRPSGVPDRFSGSKSGTSASLAISGLRSEDXADYYCQTWGTGINVIFGGXTKLTVLGEXKLISEXXLSGSAA

SEQ ID NO: 45 - protein, 266 aa, Artificial Sequence
  TNF-? (1) scFv antibody
  VARIANT 242..243: Any amino acid
  VARIANT 258..260: Any amino acid
EVQLLESGGGLVQPGGSLRLSCAASGFTFGSSYMYWVRQAPGKGLEWVSSIYGSSSSTSYADSVKGRFTISRDNSKNTLYLQMNSLRAEDTAVYYCARGYYWDYMDYWGQGTLVTVSSGGGGSGGGGSGGGGSDIQMTQSPSSLSASVGDRVTITCRASQSISSYLNWYQQKPGKAPKLLIYAASSLQSGVPSRFSGSGSGTDFTLTISSLQPEDFATYYCQQAWDLPTFGQGTKLEIKRLXXYKDHDGDYKDHDIDXXXTMTRRP

SEQ ID NO: 46 - protein, 259 aa, Artificial Sequence
  TNF-? (2) scFv antibody
  VARIANT 191: Any amino acid
  VARIANT 200: Any amino acid
  VARIANT 237: Any amino acid
  VARIANT 244: Any amino acid
  VARIANT 251..252: Any amino acid
EVQLLESGGGLVQPGGSLRLSCAASGFTFDDYGMSWVRQAPGKGLEWVAVISYDGSNKYYADSVKGRFTISRDNSKNTLYLQMNSLRAEDTAVYYCTRHLGSAMGYWGQGTLVTVSSGGGGSGGGGSGGGGSQSVLTQPPSASGTPGQRVTISCTGSSSNIGAGYDVHWYQQLPGTAPKLLIYGNSNRPSXVPDRFSGSXSGTSASLAISGLRSEDEADYYCQSYDSSLSGWVFGGXTKLTVLXEQKLISXXDLSGSAA

SEQ ID NO: 47 - protein, 262 aa, Artificial Sequence
  IL-1ra (1) scFv antibody
  VARIANT 240: Any amino acid
  VARIANT 244: Any amino acid
  VARIANT 247: Any amino acid
  VARIANT 254: Any amino acid
EVQLLESGGGLVQPGGSLRLSCAASGFTFDTHWMSWVRQAPGKGLEWVSAISGSGGSTYYADSVKGRFTISRDNSKNTLYLQMNSLRAEDTAVYYCARHDYGDYRAFDIWGQGTLVTVSSGGGGSGGGGSGGGGSQSVLTQPPSASGTPGQRVTISCTGSSSNIGAGYVVHWYQQLPGTAPKLLIYGNNNRPSGVPDRFSGSKSGTSASLAISGLRSEDEADYYCQSYDSSLSGVVFGGXTKLXVLXEQKLISXEDLSGSAA

SEQ ID NO: 48 - protein, 259 aa, Artificial Sequence
  IL-1ra (2) scFv antibody
  VARIANT 217: Any amino acid
  VARIANT 227: Any amino acid
  VARIANT 237: Any amino acid
  VARIANT 251..254: Any amino acid
EVQLLESGGGLVQPGGSLRLSCAASGFTFSKYAMTWVRQAPGKGLEWVSAISGSGGNTYYADSVKGRFTISRDNSKNTLYLQMNSLRAEDTAVYYCARLVRGLYYGMDVWGQGTLVTVSSGGGGSGGGGSGGGGSQSVLTQPPSASGTPGQRVTISCSGSSSNIGNNAVNWYQQLPGTAPKLLIYGNSNRPSGVPDRFSGSKSGTSASLAISGLRSXDEADYYCQTXGTGPVVFGGXTKLTVLGEQKLISXXXXSGSAA

SEQ ID NO: 49 - protein, 263 aa, Artificial Sequence
  IL-1ra (3) scFv antibody
  VARIANT 241..242: Any amino acid
  VARIANT 245: Any amino acid
  VARIANT 248: Any amino acid
EVQLLESGGGLVQPGGSLRLSCAVSGFTFSSYSMNWVRQAPGKGLEWVAGIGGRGATTYYVDSVKGRFTISRDNSKNTLYLQMNSLRAEDTAVYYCARLRVVPAARFDYWGQGTLVTVSSGGGGSGGGGSGGGGSQSVLTQPPSASGTPGQRVTISCSGSSSNIGSNTVNWYQQLPGTAPKLLIYGNSNRPSGVPDRFSGSKSGTSASLAISGLRSEDEADYYCQSYDSSLSGPPWVFGGXXKLXVLXEQKLISEEDLSGSAA

SEQ ID NO: 50 - protein, 263 aa, Artificial Sequence
  IL-16 (1) scFv antibody
  VARIANT 241: Any amino acid
  VARIANT 256: Any amino acid
EVQLLESGGGLVQPGGSLRLSCAASGFTFSNHAMSWVRQAPGKGLEWVSGVSWNGSRTHYADSVKGRFTISRDNSKNTLYLQMNSLRAEDTAVYYCARAALVQGVKHAFEIWGQGTLVTVSSGGGGSGGGGSGGGGSQSVLTQPPSASGTPGQRVTISCSGSSSNIGSNTVNWYQQLPGTALKLLIYRNNQRPSGVPDRFSGSKSGTSASLAISGLRSEDEADYYCASWDDRLSGLVFGGXTKLTVLGEQKLISEXDLSGSAA

SEQ ID NO: 51 - protein, 263 aa, Artificial Sequence
  IL-16 (2) scFv antibody
  VARIANT 204: Any amino acid
  VARIANT 220: Any amino acid
  VARIANT 241: Any amino acid
  VARIANT 248: Any amino acid
EVQLLESGGGLVQPGGSLRLSCAASGFTFSNHAMSWVRQAPGKGLEWVSGVSWNGSRTHYADSVKGRFTISRDNSKNTLYLQMNSLRAEDTAVYYCARAALVQGVKHAFEIWGQGTLVTVSSGGGGSGGGGSGGGGSQSVLTQPPSASGTPGQRVTISCSGSSSNIGSNTVNWYQQLPGTALKLLIYRNNQRPSGVPDRFSGSXSGTSASLAISGLRSEXEADYYCASWDDRLSGLVFGGXTKLTVLXEQKLISEEDLSGSAA

SEQ ID NO: 52 - protein, 259 aa, Artificial Sequence
  IL-18 (1) scFv antibody
  VARIANT 201: Any amino acid
  VARIANT 226: Any amino acid
  VARIANT 237: Any amino acid
  VARIANT 251..253: Any amino acid
EVQLLESGGGLVQPGGSLRLSCAASGFTFSSYGMHWVRQAPGKGLEWVSGINWNGGSTGYADSVKGRFTISRDNSKNTLYLQMNSLRAEDTAVYYCARDLRGGRFDPWGQGTLVTVSSGGGGSGGGGSGGGGSQSVLTQPPSASGTPGQRVTISCTGSSSNIGAGYVVHWYQQLPGTAPKLLIYRNNQRPSGVPDRFSGSXSGTSASLAISGLRSEDEADYYCSSXAGSKNLIFGGXTKLTVLGEQKLISXXXLSGSAA

SEQ ID NO: 53 - protein, 262 aa, Artificial Sequence
  IL-18 (2) scFv antibody
  VARIANT 226: Any amino acid
  VARIANT 240..241: Any amino acid
  VARIANT 244: Any amino acid
  VARIANT 249: Any amino acid
  VARIANT 255: Any amino acid
EVQLLESGRGLVQPGGSLRLSCAASGFTFSSYGMHWVRQAPGKGLEWVSAIGTGGDTYYADSVMGRFTISRDNSKNTLYLQMNSLRAEDTAVYYCARSPRRGATAGTFDYWGQGTLVTVSSGGGGSGGGGSGGGGSQSVLTQPPSASGTPGQRVTISCSGSSSNIGSNIVNWYQQLPGTAPKLLIYRNNQRPSGVPDRFSGSKSGTSASLAISGLRSEDEADYYCXSYDNSLSGWVFGGXXKLXVLGEXKLISEXDLSGSAA

SEQ ID NO: 54 - protein, 261 aa, Artificial Sequence
  MCP-4 (1) scFv antibody
  VARIANT 239: Any amino acid
  VARIANT 254: Any amino acid
EVQLLESGGGLVQPGGSLRLSCAASGFTFSSYGMHWVRQAPGKGLEWVSGISWNGGKTHYVDSVKGQFTISRDNSKNTLYLQMNSLRAEDTAVYYCARGGYSSGWAFDYWGQGTLVTVSSGGGGSGGGGSGGGGSQSVLTQPPSASGTPGQRVTISCSGRSSNIESNTVNWYQQLPGTAPKLLIYGNSNRPSGVPDRFSGSKSGTSASLAISGLRSEDEADYYCAAWDDRLNAVVFGGXTKLTVLGEQKLISEXDLSGSAA

SEQ ID NO: 55 - protein, 262 aa, Artificial Sequence
  IFN-? (1) scFv antibody
  VARIANT 195: Any amino acid
  VARIANT 204: Any amino acid
  VARIANT 228: Any amino acid
  VARIANT 239: Any amino acid
  VARIANT 248: Any amino acid
  VARIANT 255: Any amino acid
EVQLLESGGGLVQPGGSLRLSCAASGFTFSSYGMHWVRQAPGKGLEWVSGVSWNGSRTHYADSVKGRFTISRDNSKNTLYLQMNSLRAEDTAVYYCARGRTGHGWKYYFDLWGQGTLVTVSSGGGGSGGGGSGGGGSQSVLTQPPSASGTPGQRVTISCSGSSSNIGNNAVNWYQQLPGTAPKLLIYGNSNRPSXVPDRFSGSXSGTSASLAISGLRSEDEADYYCQXWGTGLGVFGGXTKLTVLGEXKLISEEXLSGSAAV

SEQ ID NO: 56 - protein, 189 aa, Artificial Sequence
  IFN-? (2) scFv antibody
EVQLLESGGGLVQPGGSLRLSCAASGFTFSRHGFHWVRQGPGKGLEWVSGVSWNGSRTHYADSVKGRFTISRDNSKNTLYLQMNSLRAEDTAVYYCARGNWYRAFDIWGQGTLVTVSSGGGGSGGGGSGGGGSQSVLTQPPSASGTPGQRVTISCSGGSSHIGRNFISWYQQLPGTAPKLLIYAGNSRP

SEQ ID NO: 57 - protein, 261 aa, Artificial Sequence
  IL-1b (1) scFv antibody
  VARIANT 219: Any amino acid
  VARIANT 239: Any amino acid
  VARIANT 254..255: Any amino acid
EVQLLESGGGLVQPGGSLRLSCAASGFTFSSYAMSWVRQAPGKGLEWVSYISSSGSTIYYADSVKGRSTISRDNSKNTLYLQMNSLRAEDTAVYYCARVRQNSGSYAYWGQGTLVTVSSGGGGSGGGGSGGGGSQSVLTQPPSASGTPGQRVTISCTGTSSNIGAPYDVHWYQQLPGTAPKLLIYGNSNRPSGVPDRFSGSKSGTSASLAISGLRSEDXADYYCQSYDSSLSAVVFGGXTKLTVLGEQKLISEXXLSGSAA

SEQ ID NO: 58 - protein, 267 aa, Artificial Sequence
  IL-1b (2) scFv antibody
  VARIANT 245: Any amino acid
  VARIANT 247: Any amino acid
  VARIANT 250: Any amino acid
  VARIANT 252: Any amino acid
  VARIANT 261: Any amino acid
EVQLLESGGGLVQPGGSLRLSCAASGFTFSRYVMTWVRQAPGKGLEWVSLISGGGSATYYADSMKGRFTISRDNSKNTLYLQMNSLRAEDTAVYYCAKRVPYDSSGYYPDAFDIWGQGTLVTVSSGGGGSGGGGSGGGGSQSVLTQPPSASGTPGQRVTISCTGSSSNIGAGYDVHWYQQLPGTAPKLLIYGNSNRPSGVPDQFSGSKSGTSASLAISGLRSEDEADYYCAAWDDSLNGPVFGGXTXLTXLXEQKLISEEXLSGSAA

SEQ ID NO: 59 - protein, 264 aa, Artificial Sequence
  IL-1b (3) scFv antibody
  VARIANT 242: Any amino acid
  VARIANT 249: Any amino acid
  VARIANT 257..258: Any amino acid
EVQLLESGGGLVQPGGSLRLSCAASGFTFSSYWMSWVRQAPGKGLEWVAVVSYDGNNKYYADSRKGRFTISRDNSKNTLYLQMNSLRAEDTAMYYCASYWYTSGWYPYGMDVWGQGTLGTVSSGGGGSGGGGSGGGGSQSVLTQPPSASGTPGQRVTISCTGSSSNIGAGYDLHWYQQLPGTAPKLLIYRNNQRPSGVPDRFSGSKSGTSASLAISGLRSEDEADYYCSSYVDNNNLVFGGXTKLTVLXEQKLISEXXLSGSAA

SEQ ID NO: 60 - protein, 265 aa, Artificial Sequence
  Eotaxin (1) scFv antibody
  VARIANT 206: Any amino acid
  VARIANT 243: Any amino acid
  VARIANT 257..258: Any amino acid
  VARIANT 262: Any amino acid
EVQLLESGGGLVQPGGSLRLSCAASGFTFSSYWMSWVRQAPGKGLEWVSGVSWNGSRTHYADSVKGRFTISRDNSKNTLYLQMNSLRAEDTAVYYCVKGKGTIAMPGRARVGWWGQGTLVTVSSGGGGSGGGGSGGGGSQSVLTQPPSASGTPGQRVTISCSGSSSNIGNNAVNWYQQLPGTAPKLLIYANSNRPSGVPDRFSGSXSGTSASLAISGLRSEDEADYYCAAWDDSLSGPVFGGXTKLTVLGEQKLISXXDLSXSAA

SEQ ID NO: 61 - protein, 322 aa, Artificial Sequence
  Eotaxin (2) scFv antibody
  VARIANT 199: Any amino acid
  VARIANT 236: Any amino acid
  VARIANT 250..252: Any amino acid
  VARIANT 257: Any amino acid
  VARIANT 269: Any amino acid
  VARIANT 277..278: Any amino acid
  VARIANT 289: Any amino acid
  VARIANT 293..295: Any amino acid
  VARIANT 299: Any amino acid
  VARIANT 301..303: Any amino acid
  VARIANT 311..312: Any amino acid
  VARIANT 314..316: Any amino acid
  VARIANT 318..322: Any amino acid
EVQLLESGGGLVQPGGSLRLSCAASGFTFSAYWMTWVRQAPGKGLEWVSVIYSGGSTYYADSVKGRFTISRDNSKNTLYLQMNSLRAEDTAVYYCARQTQQEYFDYWGQGTLVTVSSGGGGSGGGGSGGGGSQSVLTQPPSASGTPGQRVTISCFGSNSNIGSSTVNWYQQLPGTAPKLLIYDNDKRPSGVPDRFSGSXSGTSASLAISGLRSEDEADYYCAAWDDSLNGPVFGGXTKLTVLGEQKLISXXXLSGSXAAHHHHHHSPRXPIRPIVSXXTIHWPSFYNVXTGKXXXLPNXIXXXHIPLSPAXXIXXXPXXXXX

SEQ ID NO: 62 - protein, 260 aa, Artificial Sequence
  Eotaxin (3) scFv antibody
  VARIANT 218: Any amino acid
  VARIANT 235: Any amino acid
  VARIANT 239: Any amino acid
EVQLLESGGGLVQPGGSLRLSCAASGFTFRGYAMSWVRQAPGKGLEWVSGVSWNGSRTHYADSVKGRFTISRDNSKNTLYLQMNSLRAEDTAVYYCARAPAVAGWFDPWGQGTLVTVSSGGGGSGGGGSGGGGSQSVLTQPPSASGTPGQRVTISCSGSSSNIGSHTVNWYQQLPGTAPKLLIYRNNQRPSGVPDRFSGSKSGTSASLAISGLRSEDXADYYCAAWDDSLSGRVXGGGXKLTVLGEQKLISEEDLSGSAA

SEQ ID NO: 63 - protein, 263 aa, Artificial Sequence
  RANTES (1) scFv antibody
  VARIANT 241: Any amino acid
  VARIANT 256..257: Any amino acid
EVQLLESGGGLVQPGGSLRLSCAASGFTFSSYGMHWVRQAPGKGLEWVAVISNDGTKKDYADSVKGRFTISRDNSKNTLYLQMNSLRAEDTAVYYCARDASGYDDYYFDYWGQGTLVTVSSGGGGSGGGGSGGGGSQSVLTQPPSASGTPGQRVTISCTGSSSNIGAGSDVHWYQQLPGTAPKLLIYRDDQRSSGVPDRFSGSKSGTSAFLAISGLRSEDEADYYCQSYDNSLSGWVFGGXTKLTVLGEQKLISEXXLSGSAA

SEQ ID NO: 64 - protein, 191 aa, Artificial Sequence
  RANTES (2) scFv antibody
EVQLLESGGGLVQPGGSLRLSCAASGFTFSSYAMSWVRQAPGKGLEWVSAISGSGGSTYYADSVKGRFTISRDNSKNTLYLQMNSLRAEDTAVYYCARDNDYSSDTFDYWGQGTLVTVSSGGGGSGGGGSGGGGSQSVLTQPPSAFGTPGQRVTISCSGSSSNIGSDYVYWYQQLPGTAPKLLIYSDNQRP

SEQ ID NO: 65 - protein, 263 aa, Artificial Sequence
  RANTES (3) scFv antibody
  VARIANT 241: Any amino acid
  VARIANT 256: Any amino acid
EVQLLESGGGLVQPGGSLRLSCAASGFTFSNYGMNWVRQAPGKGLEWVSGVSWNGSRTHYVDSVKRRFTISRDNSKNTLYLQMNSLRAEDTAVYYCARPRLRSHNYYGMDVWGQGTLVTVSSGGGGSGGGGSGGGGSQSVLTQPPSASGTPGQRVTISCSGSSFKSGKNYVSWYQQLPGTAPKLLIYRNNQRPSGVPDRFSGSKSGTSASLAISGLRSEDEADYYCAAWDVRVKGVIFGGXTKLTVLGEQKLISEXDLSGSAA

SEQ ID NO: 66 - protein, 258 aa, Artificial Sequence
  MCP-1 (1) scFv antibody
  VARIANT 215: Any amino acid
  VARIANT 236: Any amino acid
  VARIANT 243: Any amino acid
  VARIANT 251..252: Any amino acid
EVQLLESGGGLVQPGGSLRLSCAASGFTFSSYAMSWVRQAPGKGLEWVSGVSWNGSRTHYADSVKGRFTISRDNSKNTLYLQMNSLRAEDTAVYYCARGGHQQLGQWGQGTLVTVSSGGGGSGGGGSGGGGSQSVLTQPPSASGTPGQRVTISCSGSSSNIGNNYVSWYQQLPGTAPKLLIYRDSRRPSGVPDRFSGSKSGTSASLAISGLRSEXEADYYCAAWDDSLKGWLFGGXTKLTVLXEQKLISEXXLSGSAA

SEQ ID NO: 67 - protein, 261 aa, Artificial Sequence
  MCP-1 (2) scFv antibody
  VARIANT 239: Any amino acid
  VARIANT 246: Any amino acid
  VARIANT 254: Any amino acid
EVQLLESGGGLVQPGGSLRLSCAASGFTFSSYAMSWVRQAPGKGLEWVSYISSSSSYTNYADSVKGRFTISRDNSKNTLYLQMNSLRAEDTAVYYCARFRYNSGKMFDYWGQGTLVTVSSGGGGSGGGGSGGGGSQSVLTQPPSASGTPGQRVTISCSGSSSNIGRNTVNWYQQLPGTAPKLLIYGNSNRRSGVPDRFSGSKSGTSASLAISGLRSEDEADYYCAAWDDSLSGVVFGGXTKLTVLXEQKLISEXDLSGSAA

SEQ ID NO: 68 - protein, 261 aa, Artificial Sequence
  MCP-1 (3) scFv antibody
  VARIANT 219: Any amino acid
  VARIANT 239: Any amino acid
  VARIANT 253: Any amino acid
EVQLLESGGGLVQPGGSLRLSCAASGFTFSNYGMHWVRQAPGKGLEWVAVISYDGSNKYYADSVKGRFTISRDNSKNTLYLQMNSLRAEDTAVYYCAKSHYYDTTSFDYWGQGTLVTVSSGGGGSGGGGSGGGGSQSVLTQPPSASGTPGQRVTISCSGSSSNIGTNPVNWYQQLPGTAPKLLIYDNNKRPSGVPDRFSGSKSGTSASLAISGLRSEDXADYYCAAWDDSLSGVVFGGXTKLTVLGEQKLISXEDLSGSAA

SEQ ID NO: 69 - protein, 263 aa, Artificial Sequence
  MCP-3 (1) scFv antibody
  VARIANT 222: Any amino acid
  VARIANT 241: Any amino acid
EVQLLESGGGLVQPGGSLRLSCAASGFTFSTYGMHWVRQAPGKGLEWVSGVSWNGSRTHYVNSVKRRFTISRDNSKNTLYLQMNSLRAEDTAVYYCARVAPGSGKRLRAFDIWGQGTLVTVSSGGGGSGGGGSGGGGSQSVLTQPPSASGTPGQRVTISCSGSSSNIGNNAVNWYQQLPGTAPKLLIYEVSKRPPGVPDRFSGSKSGTSASLAISGLRSEDXADYYCSSYAGSSKWVFGGXTKLTVLGEQKLISEEDLSGSAA

SEQ ID NO: 70 - protein, 256 aa, Artificial Sequence
  MCP-3 (2) scFv antibody
  VARIANT 234: Any amino acid
  VARIANT 248..250: Any amino acid
EVQLLESGGGLVQPGGSLRLSCAASGFTLSSNYMSWVRQAPGKGLEWVSGISASGHSTHYADSGKARFTISRDNSKNTLYLQMNSLRAEDTAVYYCARGKSLAYWGQGTLVTVSSGGGGSGGGGSGGGGSQSVLTQPPSASGTPGQRVTISCSGSSSNIGNNAVNWYQQLPGTAPKLLIYRNNQRPSGVPDRFSGSKSGTSASLAISGLRSEDEADYYCAAWDDSLSVVVFGGXTKLTVLGEQKLISXXXLSGSAA

SEQ ID NO: 71 - protein, 261 aa, Artificial Sequence
  MCP-3 (3) scFv antibody
  VARIANT 221: Any amino acid
  VARIANT 238..239: Any amino acid
  VARIANT 254..255: Any amino acid
EVQLLESGGGLVQPGGSLRLSCAASGFTFSIYWMSWVRQAPGKGLEWVAYIGGISNTVSYSDSVKGRFTISRDNSKNTLYLQMNSLRAEDTAVYYCAKAPGYSSGWGWFDPWGQGTLVTVSSGGGGSGGGGSGGGGSQSVLTQPPSASGTPGQRVTISCSGSSSNIGTNSVFWYQQLPGTAPKLLIYGNNNRPSGVPDRFSGSKSGTSASLAISGLRSEDXADYYCMIWHSSASVFGXXTKLTVLGEQKLISEXXLSGSAA

SEQ ID NO: 72 - protein, 252 aa, Artificial Sequence
  B-galactosidase scFv antibody
  VARIANT 200: Any amino acid
  VARIANT 235: Any amino acid
  VARIANT 243: Any amino acid
EVQLLESGGGLVQPGGSLRLSCAASGFTFSSYAMHWVRQAPGKGLEWVAVIAYDGINEYYGDSVKGRFTISRDNSKNTLYLQMNSLRAEDTAVYYCARGGIYHGFDIWGQGTLVTVSSGGGGSGGGGSGGGGSQSVLTQPPSASGTPGQRVTISCSGSSSNIGSNYVYWYQQLPGTAPKLLIYDNHKRPSGVPDRFSGSXSGTSASLAISGLRSEDEADYYCAAWDDNSWVFGGXTKLTVLGXYKDDDDKAA

SEQ ID NO: 73 - protein, 305 aa, Artificial Sequence
  Angiomotin (1) scFv antibody
  VARIANT 201: Any amino acid
  VARIANT 218: Any amino acid
  VARIANT 238: Any amino acid
  VARIANT 248: Any amino acid
  VARIANT 261..262: Any amino acid
  VARIANT 267..268: Any amino acid
  VARIANT 281: Any amino acid
  VARIANT 292: Any amino acid
  VARIANT 294..295: Any amino acid
  VARIANT 298: Any amino acid
  VARIANT 300..302: Any amino acid
  VARIANT 304..305: Any amino acid
EVQLLESGGGLVQPGGSLRLSCAASGFTFSDHYMDWVRQAPGKGLEWVSGVSWNGSRTHYADSVKGRFTISRDNSKNTLYLQMNSLRAEDTAVYYCARDTWAYGAFDIWGQGTLVTVSSGGGGSGGGGSGGGGSQSVLTQPPSASGTPGQRVTISCSGSNSNIGRNTVNWYQQLPGTAPKLLIYRDNQRPSGVPDRFSGSXSGTPASLAISGLRSEDXADYYCAAWDVSLNGWVFGGXTKLTVLGDYXDHDGDYKDHDIDXXDDDDXXAAHHHHHHSPRWXIRPIVSRITIXWXXFYXVXXXKXX

SEQ ID NO: 74 - protein, 320 aa, Artificial Sequence
  Angiomotin (2) scFv antibody
  VARIANT 237: Any amino acid
  VARIANT 245: Any amino acid
  VARIANT 265: Any amino acid
  VARIANT 268: Any amino acid
  VARIANT 279..281: Any amino acid
  VARIANT 283: Any amino acid
  VARIANT 287: Any amino acid
  VARIANT 289: Any amino acid
  VARIANT 292..294: Any amino acid
  VARIANT 298..299: Any amino acid
  VARIANT 304..309: Any amino acid
  VARIANT 311..312: Any amino acid
  VARIANT 315..317: Any amino acid
  VARIANT 319..320: Any amino acid
EVQLLESGGGLVQPGGSLRLSCAASGFTFNDYYMTWIRQAPGKGLEWVSYISSSGSTIYYADSVKGRFTISRDNSKNTLYLQMNSLRAEDTAVYYCARERLPDVFDVWGQGTLVTVSSGGGGSGGGGSGGGGSQSVLTQPPSASGTPGQRVTISCSGSGSNIGTNSVSWYQQLPGTAPKLLIYFDDLLPSGVPDRFSGSKSGTSASLAISGLRSEDEADYYCAAWDDSLSGVVFGGXTKLTVLGXYKDHDGDYKDHDIDYKDDDXKAXAHHHHHHSPRXXXRXIVSXIXIHXXXFYNXXTGKTXXXXXXIXXAAXXXFXX

SEQ ID NO: 75 - protein, 256 aa, Artificial Sequence
  Leptin scFv antibody
  VARIANT 239: Any amino acid
  VARIANT 247: Any amino acid
  VARIANT 251: Any amino acid
EVQLLESGGGLVQPGGSLRLSCAASGFTFGDFAMSWVRQAPGKGLEWVANIKQDGSVKYYVDSVKGRFTISRDNSKNTLYLQMNSLRAEDTAVYYCARFLAGFYYGMDVWGQGTLVTVSSGGGGSGGGGSGGGGSQSVLTQPPSASGTPGQRVTISCSGSDSNIGGNTVNWYQQLPGMAPKLLIYYDDLLPSGVPDRFSGSKSGTSASLAISGLRSEDEADYYCAAYDDTMNGWGFGGXTKLTVLGXYKDXDDKAA

SEQ ID NO: 76 - protein, 261 aa, Artificial Sequence
  Integrin a10 scFv antibody
  VARIANT 239: Any amino acid
  VARIANT 254: Any amino acid
EVQLLESGGGLVQPGGSLRLSCAASGFTFSTYNMNWVRQAPGKGLEWVSTISGSGGRTYYADSVKGRFTISRDNSKNTLYLQMNSLRAEDTAVYYCARDRVATLDAFDIWGQGTLVTVSSGGGGSGGGGSGGGGSQSVLTQPPSASGTPGQRVTISCSGSSSNIGSNSVSWYQQLPGTAPKLLIYSNNQRPSGVPDRFSGSKSGTSASLAISGLRSEDEADYYCAAWDDSLSGVVFGGXTKLTVLGEQKLISEXDLSGSAA

SEQ ID NO: 77 - protein, 262 aa, Artificial Sequence
  Integrin a11 scFv antibody
  VARIANT 202: Any amino acid
  VARIANT 232: Any amino acid
  VARIANT 240: Any amino acid
  VARIANT 247: Any amino acid
  VARIANT 255..256: Any amino acid
EVQLLESGGGLVQPGGSLRLSCAASGFTFRRDWMSWVRQVPGKGLEWVSVISGSDGSTYYADSVKGRFTISRDNSKNTLYLQMNSLRAEDTAVYYCASYSPLGNWFDSWGQGTLVTVSSGGGGSGGGGSGGGGSQSVLTQPPSASGTPGQRVTISCTGSSSNIGAGYDVHWYQQLPGTAPKLLIYSDTYRPSGVPDRFSGSXSGTSASLAISGLRSEDEADYYCQSYDSSLXGFVVFGGXTKLTVLXEQKLISEXXLSGSAA

SEQ ID NO: 78 - protein, 257 aa, Artificial Sequence
  IgM (1) scFv antibody
  VARIANT 235: Any amino acid
  VARIANT 239: Any amino acid
  VARIANT 249..251: Any amino acid
EVQLLESGGGLVQPGGSLRLSCAASGFTFSDYYMSWIRQAPGKGLEWVSAIGSGPYYAHSVRDRFTISRDNSKNTLYLQMNSLRAEDTAVYYCARGGVEASFDYWGQGTLVTVSSGGGGSGGGGSGGGGSQSVLTQPPSASGTPGQRVTISCTGSSSNIGAGYDVHWYQQLPGTAPKLLIYGNTNRPSGVPNRFSGSKSGTSASLAISGLRSEDEADYYCQSYDNDLSGWVFGGXTKLXVLGEQKLISXXXLSGSAA

SEQ ID NO: 79 - protein, 261 aa, Artificial Sequence
  LDL (1) scFv antibody
  VARIANT 254..255: Any amino acid
EVQLLESGGGLVQPGGSLRLSCAASGFTFSDYYMSWVRQAPGKGLEWVSGVSWNGSRTHYADSVKGRFTISRDNSKNTLYLQMNSLRAEDTAVYYCARAARYSYYYYGMDVWGQGTLVTVSSGGGGSGGGGSGGGGSQSVLTQPPSASGTPGQRVTISCSGSSSNIGNNAVNWYQQLPGTAPKLLIYGNDRRPSGVPDRFSGSKSGTSASLAISGLRSEDEADYYCQTWGTGRGVFGGGTKLTVLGEQKLISEXXLSGSAA

SEQ ID NO: 80 - protein, 275 aa, Artificial Sequence
  LDL (2) scFv antibody
  VARIANT 198: Any amino acid
  VARIANT 207: Any amino acid
  VARIANT 224: Any amino acid
  VARIANT 244: Any amino acid
  VARIANT 251..252: Any amino acid
  VARIANT 261: Any amino acid
  VARIANT 270..271: Any amino acid
EVQLLESGGGLVQPGGSLRLSCAASGFTFSNAWMSWVRQAPGKGLEWVSSISTSSNYIYYADSVKGRFTISRDNSKNTLYLQMNSLRAEDTAVYYCARVKKYSSGWYSNYAFDIWGQGTLVTVSSGGGGSGGGGSGGGGSQSVLTQPPSASGTPGQRVTISCSGSSSSIGNNFVSWYQQLPGTAPKLLIYDNNKRPSXVPDRFSGSXSGTSASLAISGLRSEDXADYYCAAWDDSLNGWVFGGXTKLTVLXXYKDHDGDYXDHDIDYKDXXDKAA

SEQ ID NO: 81 - protein, 262 aa, Artificial Sequence
  PSA scFv antibody
  VARIANT 207: Any amino acid
  VARIANT 245: Any amino acid
  VARIANT 257..258: Any amino acid
EVQLLESGGGLVQPGGSLRLSCAASGFTFRSYEMNWVRQAPGKGLEWVAVIGGNGVDTDYADSVKGRFTISRDNSKNTLYLQMNSLRAEDTAVYYCVREEVDFWSGYYSYGMDVWGQGTLVTVSSGGGGSGGGGSGGGGSQSVLTQPPSASGTPGQRVTISCSGSSSNIGDNFVSWYQQLPGTAPKLLIYRTNGRPSGVPDRFSGSXSGTSASLAISGLRSEDEADYYCATWDDNLNGRVVFGGXTKLTVLGDYKDXXDKAA

SEQ ID NO: 82 - protein, 255 aa, Artificial Sequence
  Lewis x (1) scFv antibody
  VARIANT 238: Any amino acid
EVQLLESGGGLVQPGGSLRLSCAASGFTFSNYWMHWVRQAPGKGLEWVANIKEDGSEKYYVDSVKGRFTISRDNSKNTLYLQMNSLRAEDTAVYYCAREGETSFGLDVWGQGTLVTVSSGGGGSGGGGSGGGGSQSVLTQPPSASGTPGQRVTISCSGSSSNIGSNTVNWYQQLPGTAPKLLIYSNNQRPSGVPDRFSGSKSGTSASLAISGLRSEDEADYYCASWDDSLSGWVFGGXTKLTVLGDYKDDDDKAA

SEQ ID NO: 83 - protein, 258 aa, Artificial Sequence
  Lewis x (2) scFv antibody
  VARIANT 219: Any amino acid
  VARIANT 241: Any amino acid
  VARIANT 249: Any amino acid
  VARIANT 253..254: Any amino acid
EVQLLESGGGLVQPGGSLRLSCAASGFTFSRYWMHWVRQAPGKGLEWVANIKPDGSEQYYADSVKGRFTISRDNSKNTLYLQMNSLRAEDTAVYYCAREGLSSGWSYGMDVWGQGTLVTVSSGGGGSGGGGSGGGGSQSVLTQPPSASGTPGQRVTISCSGSNSNIGSNTVNWYQQLPGTAPKLLIYTNINRPSGVPDRFSGSKSGTSASLAISGLRSXDEADYYCATWDDSLSGWVFGGXTKLTVLGXYKDXXDKAA

SEQ ID NO: 84 - protein, 258 aa, Artificial Sequence
  Lewis y scFv antibody
  VARIANT 220: Any amino acid
  VARIANT 241: Any amino acid
  VARIANT 248: Any amino acid
  VARIANT 252: Any amino acid
EVQLLESGGGLVQSGGSLRLSCAASGFTFSSYTLHWVRQAPGKGLEYVSAISSNGGSTYYADSVKGRFTISRDNSKNTLYLQMNSLRAEDTAVYYCASDVYGDYPRGLDYWGQGTLVTVSSGGGGSGGGGSGGGGSQSVLTQPPSASGTPGQRVTISCSGTTSNIGSNYVHWYQQLPGTAPKLLIYGNNNRPSGVPDRFSGSKSGTSASLAISGLRSEDXADYYCQSYDRSLGGLRVFGGXTKLTVLXDYKXDDDKAA

SEQ ID NO: 85 - protein, 294 aa, Artificial Sequence
  Sialyl x scFv antibody
  VARIANT 217: Any amino acid
  VARIANT 237: Any amino acid
  VARIANT 252: Any amino acid
  VARIANT 258: Any amino acid
  VARIANT 265..272: Any amino acid
  VARIANT 274..291: Any amino acid
  VARIANT 293..294: Any amino acid
EVQLLESGGGLVQPGGSLRLSCAASGFTLSSYAMSWVRQAPGKGLEWVSSISSGNSYIYYADSVKGRFTISRDNSKNTLYLQMNSLRAEDTAVYYCARGRGRGGGFELWGQGTLVTVSSGGGGSGGGGSGGGGSQSVLTQPPSASGTPGQRVTISCSGSSSNIGTYTVNWYQQLPGTAPKLLIYSNNQRPSGVPDRFSGSKSGTSASLAISGLRSEXEADYYCSSNAGIDNILFGGXTKLTVLGEQKLISEXDLSGSXAAHHHHXXXXXXXXIXXXXXXXXXXXXXXXXXXLXX

SEQ ID NO: 86 - protein, 254 aa, Artificial Sequence
  Procathepsin W scFv antibody
  VARIANT 200: Any amino acid
  VARIANT 237: Any amino acid
  VARIANT 245: Any amino acid
  VARIANT 248: Any amino acid
EVQLLESGGGLVQPGGSLRLSCAASGFTFSSYAMSWVRQAPGKGLEWVSSMSASGGSTYYADSVKGRFTISRDNSKNTLYLQMNSLRAEDTAVYYCARDRGSYGMDVWGQGTLVTVSSGGGGSGGGGSGGGGSQSVLTQPPSASGTPGQRVTISCSGSTSNIGSYAVNWYQQLPGTAPKLLIYGNNNRPSGVPDRFSGSXSGTSASLAISGPRSEDEADYYCAAWDDSLNGGVFGGXTKLTVLGXYKXDDDKAA

SEQ ID NO: 87 - protein, 188 aa, Artificial Sequence
  BTK (1) scFv antibody
  VARIANT 166: Any amino acid
EVQLLESGGGLVQPGGSLRLSCAASGFTFSNYAMSWVRQAPGKGLEWVSGINWNGGSTGYADSVKGRFTISRDNSKNTLYLQMNSLRAEDTAVYYCAKHLKRYSGSSYLFDYWGQGTLVTVSSGGGGSGGGGSGGGGSQSVLTQPPSASGTPGQRVTISCSGSSSXIGSNYVYWYQQLPGTAPKLLIY

SEQ ID NO: 88 - protein, 258 aa, Artificial Sequence
  Digoxin scFv antibody
  VARIANT 236: Any amino acid
  VARIANT 250..252: Any amino acid
  VARIANT 255: Any amino acid
EVQLLESGGGLVQPGGSLRLSCAASGFTFSSYAMSWVRQAPGKGLEWVAVIWHDGSSKYYADSVKGRFTISRDNSKNTLYLQMNSLRAEDTAVYYCARATGDGFDYWGQGTLVTVSSGGGGSGGGGSGGGGSQSVLTQPPSASGTPGQRVTISCSGSSSNIGSNYVYWYQQLPGTAPKLLIYRNNQRPSGVPDRFSGSKSGTSASLAISGLRSEDEADYYCAAWDDSLNGVVFGGXTKLTVLGEQKLISXXXLSXSAA

SEQ ID NO: 89 - protein, 262 aa, Artificial Sequence
  GLP-1 R scFv antibody
  VARIANT 245: Any amino acid
EVQLLESGGGLVQPGGSLRLSCAASGFTFRSYGMHWVRQAPGKGLEWVSGLSWNSAGTGYADSVKGRFTISRDNSKNTLYLQMNSLRAEDTAVYYCAKEMGNNWDHIDYWGQGTLVTVSSGGGGSGGGGSGGGGSQSVLTQPPSASGTPGQRVTISCTGSSSNIGAGYDVHWYQQLPGTAPKLLIYGNSNRPSGVPDRFSGSKSGTSASLAISGLRSEDEADYYCAAWDDGLSGPVFGGGTKLTXLGEQKLISEEDLSGSAA

SEQ ID NO: 90 - protein, 260 aa, Artificial Sequence
  GLP-1 scFv antibody
  VARIANT 238: Any amino acid
  VARIANT 245: Any amino acid
  VARIANT 252: Any amino acid
  VARIANT 254: Any amino acid
EVQLLESGGGLVQPGGSLRLSCAASGFTFNSYGMHWVRQAPGKGLEWVSAISGSGGSTYYAESVKGRSTISRDNSKNTLYLQMNSLRAEDTAVYYCVTRNAVFGFDVWGQGTLVTVSSGGGGSGGGGSGGGGSQSVLTQPPSASGTPGQRVTISCTGSSSNIGAGFDVHWYQQLPGTAPKLLIYDNNKRPSGVPDRFSGSKSGTSASLAISGLRSEDEADYYCQSFDSSLSGVVFGGXTKLTVLXEQKLISXEXLSGSAA

SEQ ID NO: 91 - protein, 320 aa, Artificial Sequence
  C1q scFv antibody
  VARIANT 197: Any amino acid
  VARIANT 223: Any amino acid
  VARIANT 244: Any amino acid
  VARIANT 259..260: Any amino acid
  VARIANT 267..268: Any amino acid
  VARIANT 283: Any amino acid
  VARIANT 286: Any amino acid
  VARIANT 289..290: Any amino acid
  VARIANT 295..300: Any amino acid
  VARIANT 302..303: Any amino acid
  VARIANT 306..307: Any amino acid
  VARIANT 309..311: Any amino acid
  VARIANT 313: Any amino acid
  VARIANT 315..320: Any amino acid
EVQLLESGGGLVQPGGSLRLSCAASGFTFDDYGMSWVRQVPGKGLEWVSAISGSGATTFYAHSVQGRFTISRDNSKNTLYLQMNSLRAEDTAVYYCARGGRGYDWPSGAFDIWGQGTLVTVSSGGGGSGGGGSGGGGSQSVLTQPPSASGTPGQRVTISCTGSSSNIGAGYDVHWYQQLPGTAPKLLIYENNKRPSXVPDRFSGSKSGTSASLAISGLRSEDXADYYCAAWDDSVNGYVVFGGXTKLTVLGEQKLISEXXLSGSAAXXHHHHHSPRWPIRPIXSRXTIXXPSFYXXXXXXTXXLPXXIXXXHXPXXXXXX

SEQ ID NO: 92 - protein, 262 aa, Artificial Sequence
  C1s scFv antibody
  VARIANT 202: Any amino acid
  VARIANT 240..241: Any amino acid
  VARIANT 247: Any amino acid
  VARIANT 250: Any amino acid
  VARIANT 254..256: Any amino acid
EVQLLESGGGLVQPGGSLRLSCAASGFTFSSYAMSWVRQAPGKGLEWVSGVSWNGSRTHYADSVKGRFTISRDNSKNTLYLQMNSLRAEDTAVYYCARHMKAAAYVFEIWGQGTLVTVSSGGGGSGGGGSGGGGSQSVLTQPPSASGTPGQRVTISCSGSSSNIGSTAVNWYQQLPGTAPKLLIYSNNKRPSGVPDRFSGSXSGTSASLAISGLRSEDEADYYCAAWDDRLNGNVLFGGXXKLTVLXEQXLISXXXLSGSAA

SEQ ID NO: 93 - protein, 261 aa, Artificial Sequence
  C3 (1) scFv antibody
  VARIANT 239: Any amino acid
  VARIANT 253..255: Any amino acid
EVQLLESGGGLVQPGGSLRLSCAASGFTFSSYAMSWVRQAPGKGLEWVSSVTGSGGGTYYADSVEGRFTISRDNSKNTLYLQMNSLRAEDTAVYYCARYRWFGNDAFDIWGQGTLVTVSSGGGGSGGGGSGGGGSQSVLTQPPSASGTPGQRVTISCSGSASNLGMHFVSWYQQLPGTAPKLLIYGNSNRPSGVPDRFSGSKSGTSASLAISGLRSEDEADYYCAAWDDTLNIWVFGGXTKLTVLGEQKLISXXXLSGSAA

SEQ ID NO: 94 - protein, 263 aa, Artificial Sequence
  C3 (2) scFv antibody
  VARIANT 220: Any amino acid
  VARIANT 241: Any amino acid
  VARIANT 249: Any amino acid
EVQLLESGGGLVQPGGSLRLSCAASGFTFSTYRMIWVRQAPGKGLEWVSSISGSNTYIHYADSVRGRFTISRDNSKNTLYLQMNSLRAEDTAVYYCARDRHPLLPSGMDVWGQGTLVTVSSGGGGSGGGGSGGGGSQSVLTQPPSASGTPGQRVTISCSGSSSNIGKHPVNWYQQLPGTAPKLLIYRNDQRPSGVPDRFSGSKSGTSASLAISGLRSEDXADYYCQSYDSSLSGSWVFGGXTKLTVLGXQKLISEEDLSGSAA

SEQ ID NO: 95 - protein, 263 aa, Artificial Sequence
  C4 (1) scFv antibody
  VARIANT 241: Any amino acid
  VARIANT 248: Any amino acid
  VARIANT 256..257: Any amino acid
EVQLLESGGGLVQPGGSLRLSCAASGFTFSSYPMSWVRQAPGKGLEWVSTLYAGGWTSYADSVWGRFTISRDNSKNTLYLQMNSLRAEDTAVYYCARPKVESLSRYGMDVWGQGTLVTVSSGGGGSGGGGSGGGGSQSVLTQPPSASGTPGQRVTISCTGSSSNIGAGYVVHWYQQLPGTAPKLLIYDNSKRPSGVPDRFSGSKSGTSASLAISGLRSEDEADYYCQSYDSSLSGVVFGGXTKLTVLXEQKLISEXXLSGSAA

SEQ ID NO: 96 - protein, 264 aa, Artificial Sequence
  C5 (1) scFv antibody
  VARIANT 196: Any amino acid
  VARIANT 205: Any amino acid
  VARIANT 215: Any amino acid
  VARIANT 222: Any amino acid
  VARIANT 240: Any amino acid
  VARIANT 242..243: Any amino acid
  VARIANT 249: Any amino acid
  VARIANT 257..258: Any amino acid
  VARIANT 263: Any amino acid
EVQLLESGGGLVQPGGSLRLSCAASGFTFSSYRMNWVRQAPGKGLEWVSAISGSGGSTYYADSVKGRFTISRDNSKNTLYLQMNSLRAEDTAVYYCARGGGWFSGHYYFDYWGQGTLVTVSSGGGGSGGGGSGGGGSQSVLTQPPSASGTPGQRVTISCTGATSNIGAGYDVHWYQQLPGTAPKLLIYRNNQRPSXVPDRFSGSXSGTSASLAIXGLRSEDXADYYCQSYDSSLRHWVFXGXXKLTVLXEQKLISEXXLSGSXA

SEQ ID NO: 97 - protein, 258 aa, Artificial Sequence
  C5 (2) scFv antibody
  VARIANT 216: Any amino acid
  VARIANT 236: Any amino acid
  VARIANT 243: Any amino acid
  VARIANT 252: Any amino acid
EVQLLESGGGLVQPGGSLRLSCAASGFTFSAYSMNWVRQAPGKGLEWVSGVSWNGSRTHYADSVKGRFTISRDNSKNTLYLQMNSLRAEDTAVYYCARENSGFFDYWGQGTLVTVSSGGGGSGGGGSGGGGSQSVLTQPPSASGTPGQRVTISCTGSSSNIGSNTVNWYQQLPGTAPKLLIYGNSNRPSGVPDRFSGSKSGTSASLTISGLRSEDXADYYCAAWDDSLSGWVFGGXTKLTVLXEQKLISEEXLSGSAA

SEQ ID NO: 98 - protein, 261 aa, Artificial Sequence
  C1 inh. (1) scFv antibody
  VARIANT 19: Any amino acid
  VARIANT 218..219: Any amino acid
  VARIANT 239: Any amino acid
  VARIANT 246: Any amino acid
  VARIANT 254..255: Any amino acid
  VARIANT 258: Any amino acid
EVQLLESGGGLVQPGGSLXLSCAASGFTFSDYYMSWIRQAPGKGLEWVSGISRGGEYTFYVDSVKGRFTISRDNSKNTLYLQMNSLRAEDTAVYYCARDPGGLDAFDIWGQGTLVTVSSGGGGSGGGGSGGGGSQSVLTQPPSASGTPGQRVTISCTGSSSNIGARYDVQWYQQLPGTAPKLLIYGNSNRPSGVPDRFSGSKSGTSASLAISGLRSEXXADYYCASWDDSLSGPVFGGXTKLTVLXEQKLISEXXLSXSAA

SEQ ID NO: 99 - protein, 262 aa, Artificial Sequence
  Factor B (1) scFv antibody
  VARIANT 219: Any amino acid
  VARIANT 240: Any amino acid
  VARIANT 255: Any amino acid
EVQLLESGGGLVQPGGSLRLSCAASGFTFSSYSMNWVRQAPGKGLEWVAVISYDGRFIYYSDSVKGRFTISRDNSKNTLYLQMNSLRAEDTAVYYCARSYGGNLAMDVWGQGTLVTVSSGGGGSGGGGSGGGGSQSVLTQPPSASGTPGQRVTISCTGSSSNIGAGYDVHWYQQLPGTAPKLLIYDNNKRPSGVPDRFSGSNSGTSASLAISGLRSEDXADYYCAAWDDRLNGRVVFGGXTKLTVLGEQKLISEXDLSGSAA

SEQ ID NO: 100 - protein, 262 aa, Artificial Sequence
  IL-12 (3) scFv antibody
  VARIANT 163: Any amino acid
  VARIANT 220: Any amino acid
  VARIANT 240..241: Any amino acid
  VARIANT 255: Any amino acid
EVQLLESGGGLVQPGGSLRLSCAASGFTFSRYGMHWVRQAPGKGLEWVASIRGNARGSFYADSVKGRFTISRDNSKNTLYLQMNSLRAEDTAVYYCAKGDSSGWYFFDYWGQGTLVTVSSGGGGSGGGGSGGGGSQSVLTQPPSASGTPGQRVTISCTGSDSXIGAGFDVHWYQQLPGTAPKLLIYGNNNRPSGVPDRFSGSKSGTSASLAISGLRSEDXADYYCQSYDTSLSGVLFGGXXKLTVLGEQKLISEXDLSGSAA

SEQ ID NO: 101 - protein, 254 aa, Artificial Sequence
  IL-12 (4) scFv antibody
  VARIANT 232: Any amino acid
  VARIANT 239: Any amino acid
  VARIANT 246: Any amino acid
EVQLLESGGGLVQPGGSLRLSCAASGFTFSDYGMHWVRQAPGKGLEWVSTVSGSGDNTYYADSVKGRFTISRDNSKNTLYLQMNSLRAEDTAVYYCTTTWRYWGQGTLVTVSSGGGGSGGGGSGGGGSQSVLTQPPSASGTPGQRVTISCSGSSSNIGSNTVNWYQQLPGTAPKLLIYGNSNRPSGVPDRFSGSKSGTSASLAISGLRSEDEADYYCQSYDSSLSGWVFGGXTKLTVLXEQKLISXEDLSGSAA

SEQ ID NO: 102 - protein, 259 aa, Artificial Sequence
  IL-16 (3) scFv antibody
  VARIANT 3: Any amino acid
  VARIANT 214..215: Any amino acid
  VARIANT 225: Any amino acid
  VARIANT 237: Any amino acid
  VARIANT 241: Any amino acid
EVXLLESGGGLVQPGGSLRLSCAASGFTFSSYGMHWVRQAPGKGLEWVSGINWNGGSTGYADSVKGRFTISRDNSKNTLYLQMNSLRAEDTAVYYCARERGDAFDIWGQGTLVTVSSGGGGSGGGGSGGGGSQSVLTQPPSASGTPGQRVTISCSGSSSNIGSNTVNWYQQLPGTAPKLLIYSDNQRPSGVPDRFSGSKSGTSASLAISGLRSXXEADYYCAAWXDSLNGPWVFGGXTKLXVLGEQKLISEEDLSGSAA

SEQ ID NO: 103 - protein, 263 aa, Artificial Sequence
  IL-18 (3) scFv antibody
  VARIANT 204: Any amino acid
  VARIANT 220..221: Any amino acid
  VARIANT 241: Any amino acid
  VARIANT 245: Any amino acid
  VARIANT 255..257: Any amino acid
  VARIANT 260: Any amino acid
EVQLLESGGGLVQPGGSLRLSCAASGFTFSRYGMHWVRQAPGKGLEWVAVISYDGSNKYYADSVKGRFTISRDNSKNTLYLQMNSLRAEDTAVYYCARHGYGDSRSAFDIWGQGTLVTVSSGGGGSGGGGSGGGGSQSVLTQPPSASGTPGQRVTISCTGSSSNIGAGYDVHWYQQLPGTAPKLLIYRNNQRPSGVPDRFSGSXSGTSASLAISGLRSEXXADYYCQSYDSSLSRWVFGGXTKLXVLGEQKLISXXXLSXSAA

SEQ ID NO: 104 - protein, 266 aa, Artificial Sequence
  IL-1a (3) scFv antibody
  VARIANT 169: Any amino acid
  VARIANT 199: Any amino acid
  VARIANT 208: Any amino acid
  VARIANT 227: Any amino acid
  VARIANT 233: Any amino acid
  VARIANT 239: Any amino acid
  VARIANT 244: Any amino acid
  VARIANT 258..260: Any amino acid
EVQLLESGGGLVQPGGSLRLSCAASGFTFSSYSMNWVRQAPGKGLEWVSYISSSSSYTNYADSVKGRFTISRDNSKNTLYLQMNSLRAEDTAVYYCARSVTRRAGYYYYYSGMDVWGQGTLVTVSSGGGGSGGGGSGGGGSQSVLTQPPSASGTPGQRVTISCSGSSSXIGSNTVNWYQQLPGTAPKLLIYRNNQRPSXVPDRFSGSXSGTSASLAISGLRSEDEAXYYCSSXAGSNSXVFGGXTKLTVLGEQKLISXXXLSGSAA

SEQ ID NO: 105 - protein, 260 aa, Artificial Sequence
  IL-6 (3) scFv antibody
  VARIANT 219: Any amino acid
  VARIANT 238: Any amino acid
  VARIANT 253..254: Any amino acid
EVQLLESGGGLVQPGGSLRLSCAASGFTFSNYGMHWVRQAPGKGLEWVSSITSSGDGTYFADSVKGRFTISRDNSKNTLYLQMNSLRAEDTAVYYCARAGGIAAAYAFDIWGQGTLVTVSSGGGGSGGGGSGGGGSQSVLTQPPSASGTPGQRVTISCSGSSSNVGSNYVYWYQQLPGTAPKLLIYDNNKRPSGVPDRFSGSKSGTSASLAISGLRSEXEADYYCQSYDSSRWVFGGXTKLTVLGEQKLISEXXLSGSAA

SEQ ID NO: 106 - protein, 319 aa, Artificial Sequence
  IL-6 (4) scFv antibody
  VARIANT 145: Any amino acid
  VARIANT 214: Any amino acid
  VARIANT 240: Any amino acid
  VARIANT 247: Any amino acid
  VARIANT 254..255: Any amino acid
  VARIANT 262: Any amino acid
  VARIANT 270: Any amino acid
  VARIANT 274..275: Any amino acid
  VARIANT 282: Any amino acid
  VARIANT 287..288: Any amino acid
  VARIANT 292: Any amino acid
  VARIANT 298: Any amino acid
  VARIANT 300..301: Any amino acid
  VARIANT 306..308: Any amino acid
  VARIANT 311: Any amino acid
  VARIANT 314..317: Any amino acid
  VARIANT 319: Any amino acid
EVQLLESGGGLVQPGGSLRLSCAASGFTFSSNYMSWVRQAPGKGLEWVSSISSSSTIYYADSVKGRFTISRDNSKNTLYLQMNSLRAEDTAVYYCARQPASGTYDAFDIWGQGTLVTVSSGGGGSGGGGSGGGGSQSVLTQPPSXSGTPGQRVTISCTGSSSNIGAGYDVHWYQQLPGTAPKLLIYYDDLLPSGVPDRFSGSKSGTSASLAISXLRSEDEADYYCAVWDDSLSGWVFGGXTKLTVLXEQKLISXXDLSGSAXAHHHHHHXSPRXXIRPIVSXITIHXXVVLXRRDWEXPXXTQLNXXXAHXPFXXXXNX

SEQ ID NO: 107 - protein, 259 aa, Artificial Sequence
  IL-8 (3) scFv antibody
  VARIANT 4: Any amino acid
  VARIANT 215: Any amino acid
  VARIANT 237: Any amino acid
  VARIANT 252..253: Any amino acid
EVQXLESGGGLVQPGGSLRLSCAASGFTFDDYGMSWVRQAPGKGLEWVSLISWDGGSTYYADSVKGRFTISRDNSKNTLYLQMNSLRAEDTAVYYCARDDLYGMDVWGQGTLVTVSSGGGGSGGGGSGGGGSQSVLTQPPSASGTPGQRVTISCTGSSSNIGAGYDVHWYQQLPGTAPKLLIYDNNKRPSGVPDRFSGSKSGTSASLAISGLRSXDEADYYCAAWDDSLSGWVFGGXTKLTVLGEQKLISEXXLSGSAA

SEQ ID NO: 108 - protein, 261 aa, Artificial Sequence
  MCP-4 (3) scFv antibody
  VARIANT 218: Any amino acid
  VARIANT 239: Any amino acid
  VARIANT 243: Any amino acid
  VARIANT 246: Any amino acid
  VARIANT 254..255: Any amino acid
EVQLLESGGGLVQPGGSLRLSCAASGFTFSSYGMHWVRQAPGKGLEWVSGISWNGGKTHYVDSVKGQFTISRDNSKNTLYLQMNSLRAEDTAVYYCARGGYSSGWAFDYWGQGTLVTVSSGGGGSGGGGSGGGGSQSVLTQPPSASGTPGQRVTISCSGRSSNIESNTVNWYQQLPGTAPKLLIYGNSNRPSGVPDRFSGSKSGTSASLAISGLRSEXEADYYCAAWDDRLNAVVFGGXTKLXVLXEQKLISEXXLSGSAA

SEQ ID NO: 109 - protein, 313 aa, Artificial Sequence
  Properdin scFv antibody
  VARIANT 222: Any amino acid
  VARIANT 228: Any amino acid
  VARIANT 244: Any amino acid
  VARIANT 247: Any amino acid
  VARIANT 262: Any amino acid
  VARIANT 273..274: Any amino acid
  VARIANT 287..288: Any amino acid
  VARIANT 290..294: Any amino acid
  VARIANT 298..300: Any amino acid
  VARIANT 302: Any amino acid
  VARIANT 304..309: Any amino acid
  VARIANT 313: Any amino acid
EVQLLESGGGLVQPGGSLRLSCAASGFTFSSNYMSWVRQAPGKGLEWVSAISGSGGSTYYADSVKGRFTISRDNSKNTLYLQMNSLRAEDTAVYYCAKGGSGWYDYFDYWGQGTLVTVSSGGGGSGGGGSGGGGSQSVLTQPPSASGTPGQRVTISCTGSSSNIGAGYDVHWYQQLPGTAPKLLIYRNNQRPSGVPDRFSGSKSGTSASLAISGLRSEDEAXYYCAAXDDGLNSPVFGGGTKLXVLXEQKLISEEDLSGSAXAHHHHHHSPRXXIRPIVSRITIHWXXFXXXXXGKTXXXPXLXXXXXXPPFX

SEQ ID NO: 110 - protein, 261 aa, Artificial Sequence
  TNF-? (3) scFv antibody
  VARIANT 239: Any amino acid
  VARIANT 241: Any amino acid
  VARIANT 246: Any amino acid
  VARIANT 254..255: Any amino acid
EVQLLESGGGLVQPGGSLRLSCAASGFTFSSYGMHWVRQAPGKGLEWVSAISGSGGSTYYADSVKGRFTISRDNSKNTLYLQMNSLRAEDTAVYYCARGGWGPRSAFDIWGQGTLVTVSSGGGGSGGGGSGGGGSQSVLTQPPSASGTPGQRVTISCSGSSSNIGSNTVTWYQQLPGTAPKLLIYGNTNRLSGVPDRFSGSKSGTSASLAISGLRSEDEADYYCEAWDDKLFGPVFGGXTXLTVLXEQKLISEXXLSGSAA

SEQ ID NO: 111 - protein, 261 aa, Artificial Sequence
  TNF-? (4) scFv antibody
  VARIANT 240: Any amino acid
  VARIANT 246: Any amino acid
  VARIANT 248: Any amino acid
  VARIANT 253..255: Any amino acid
EVQLLESGGGLVQPGGSLRLSCAASGFTFSSYWMSWVRQAPGKGLEWVSGVNWNGSRTHYADSVKGRFTISRDNSKNTLYLQMNSLRAEDTAVYYCASIRANYYYGMDVWGQGTLVTVSSGGGGSGGGGSGGGGSQSVLTQPPSASGTPGQRVTISCSGGSSNIGSHPVNWYQQLPGTAPKLLIYGNSNRPSGVPDRFSGSKSGTSASLAISGLRSEDEADYYCAAWDASLSGWVFGGGXKLTVLXEXKLISXXXLSGSAA

SEQ ID NO: 112 - protein, 304 aa, Artificial Sequence
  VEGF (3) scFv antibody
  VARIANT 192: Any amino acid
  VARIANT 201: Any amino acid
  VARIANT 218: Any amino acid
  VARIANT 241: Any amino acid
  VARIANT 244: Any amino acid
  VARIANT 247: Any amino acid
  VARIANT 254..256: Any amino acid
  VARIANT 261: Any amino acid
  VARIANT 273: Any amino acid
  VARIANT 281: Any amino acid
  VARIANT 283: Any amino acid
  VARIANT 288: Any amino acid
  VARIANT 293..296: Any amino acid
  VARIANT 298..300: Any amino acid
  VARIANT 302: Any amino acid
  VARIANT 304: Any amino acid
EVQLLESGGGLVQPGGSLRLSCAASGFTFSSYEMNWVRQAPGKGLEWVSGISGSGGFTYYADSVKGRFTISRDNSKNTLYLQMNSLRAEDTAMYYCAREGYQDAFDIWGQGTLVTVSSGGGGSGGGGSGGGGSQSVLTQPPSASGTPGQRVTISCTGSSSNIGAGYDVHWYQQLPGTAPKLLIYSNNQRPSXVPDRFSGSXSGTSASLAISGLRSEDXADYYCAAWDDSLSGPPWVFGGGXKLXVLXEQKLISXXXLSGSXAAHHHHHHSPRXPIRPIVSXIXIHWPXFYNVXXXXTXXXPXLX

SEQ ID NO: 113 - protein, 261 aa, Artificial Sequence
  VEGF (4) scFv antibody
  VARIANT 30..32: Any amino acid
  VARIANT 34: Any amino acid
  VARIANT 50: Any amino acid
  VARIANT 54..55: Any amino acid
  VARIANT 97..104: Any amino acid
  VARIANT 193: Any amino acid
  VARIANT 202: Any amino acid
  VARIANT 219: Any amino acid
  VARIANT 232..233: Any amino acid
  VARIANT 239: Any amino acid
  VARIANT 253..255: Any amino acid
EVQLLESGGGLVQPGGSLRLSCAASGFTFXXXYXSWVRQAPGKGLEWVSXISWXXGSIGYADSVKGRFTISRDNSKNTLYLQMNSLRAEDTAVYYCXXXXXXXXNYFDYWGQGTLVTVSSGGGGSGGGGSGGGGSQSVLTQPPSASGTPGQRVTISCSGSNSNIGGNFVYWYQQLPGTAPKLLIYENSKRPSXVPDRFSGSXSGTSASLAISGLRSEDXADYYCAAWDDSLXXVVFGGXTKLTVLGEQKLISXXXLSGSAA

SEQ ID NO: 114 - protein, 260 aa, Artificial Sequence
  IL-4 (3) scFv antibody
  VARIANT 218: Any amino acid
  VARIANT 238..239: Any amino acid
  VARIANT 253: Any amino acid
EVQLLESGGGLVQPGGSLRLSCAASGFTFSNAWMSWVRQAPGKGLEWVSAISGSGGSTYYADSVKGRFTISRDNSKNTLYLQMNSLRAEDTAVYYCARAIAARPFDYWGQGTLVTVSSGGGGSGGGGSGGGGSQSVLTQPPSASGTPGQRVTISCTGATSNIGAGYDIHWYQQLPGTAPKLLIYSTNNRPSGVPDRFSGSKSGTSASLAISGLRSEDXADYYCAAWDDSLNGPVFGGXXKLTVLGEQKLISEXDLSGSAA

SEQ ID NO: 115 - protein, 161 aa, Artificial Sequence
  CD40 (2) scFv antibody
EVQLLESGGGLVQPGGSLRLSCAASGFTFSAYWMHWVRQAPGKGLEWVSGISGGGGSTYYADSVKGRFTISRDNSKNTLYLQMNSLRAEDTAVYYCARMTPWYYGMDVWGQGTLVTVSSGGGGSGGGGSGGGGSQSMLTQPPSASGTPGQRVTISCSGSTS

SEQ ID NO: 116 - protein, 156 aa, Artificial Sequence
  CD40 (3) scFv antibody
  VARIANT 143..144: Any amino acid
EVQLLESGGGLVQPGGSLRLSCAASGFTFSTYGMHWVRQAPGKGLEWLSYISGGSSYIFYADSVRGRFTISRDNSENALYLQMNSLRAEDTAVYYCARILRGGSGMDLWGQGTLVTVSSGGGGSGGGGSGGGGSQSVLTQPPXXSGTPGQRVTISC

SEQ ID NO: 117 - protein, 256 aa, Artificial Sequence
  CD40 (4) scFv antibody
  VARIANT 219: Any amino acid
  VARIANT 232: Any amino acid
  VARIANT 239..240: Any amino acid
  VARIANT 246..247: Any amino acid
EVQLLESGGGLVQPGGSLRLSCAASGFTFSTYGMHWVRQAPGKGLEWLSYISGGSSYIFYADSVRGRFTISRDNSENALYLQMNSLRAEDTAVYYCARILRGGSGMDLWGQGTLVTVSSGGGGSGGGGSGGGGSQSVLTQPPSASGTPGQRVTISCTGSSSNIGAGYDVYWYQQLPGTAPKLLIYGNINRPSGVPDRFSGSKSGTSASLAISGLRSEDXADYYCAAWDDSLXGLVFGGXXKLTVLXXYKDDDDKAA

SEQ ID NO: 118 - protein, 265 aa, Artificial Sequence
  IgM (3) scFv antibody
  VARIANT 168: Any amino acid
  VARIANT 198: Any amino acid
  VARIANT 206..207: Any amino acid
  VARIANT 217: Any amino acid
  VARIANT 222: Any amino acid
  VARIANT 224: Any amino acid
  VARIANT 232..233: Any amino acid
  VARIANT 243: Any amino acid
  VARIANT 257..258: Any amino acid
EVQLLESGGGLVQPGGSLRLSCAASGFTFSSYAMSWVRQAPGKGLEWVSGISWNSGSIGYADSVKGRFTISRDNSKNTLYLQMNSLRAEDTAVYYCARGDYSSSPGGYYYYMDVWGQGTLVTVSSGGGGSGGGGSGGGGSQSVLTQPPSASGTPGQRVTISCSGSSSXIGSNTVNWYQQLPGTAPKLLIYGNSNRPSXVPDRFSGXXSGTSASLAIXGLRSXDXADYYCSSXXSTNTVIFGGXTKLTVLGEQKLISXXDLSGSAA

SEQ ID NO: 119 - protein, 261 aa, Artificial Sequence
  IgM (5) scFv antibody
  VARIANT 193: Any amino acid
  VARIANT 202: Any amino acid
  VARIANT 239: Any amino acid
  VARIANT 246: Any amino acid
  VARIANT 253: Any amino acid
  VARIANT 255: Any amino acid
EVQLLESGGGLVQPGGSLRLSCAASGFTFGSYEMNWVRQAPGKGLEWVSVIYSGGSTYYADSVEGRFTISRDNSKNTLYLQMNSLRAEDTAVYYCARDTNPYYYYGMDVWGQGTLVTVSSGGGGSGGGGSGGGGSQSVLTQPPSASGTPGQRVTISCSGSSSNIGNNAVNWYQQLPGTAPKLLIYRNNQRPSXVPDRFSGSXSGTSASLAISGLRSEDEADYYCQSYDSSLNGQVFGGXTKLTVLXEQKLISXEXLSGSAA

SEQ ID NO: 120 - protein, 259 aa, Artificial Sequence
  HLA-DR/DP scFv antibody
  VARIANT 190: Any amino acid
  VARIANT 199: Any amino acid
  VARIANT 216: Any amino acid
  VARIANT 237: Any amino acid
  VARIANT 244: Any amino acid
  VARIANT 251..252: Any amino acid
EVQLLESGGGLVQPGGSLRLSCAASGFTFSSYAMSWVRQAPGKGLEWVSAISGSGGSTYYADSVKGRFTISRDNSKNTLYLQMNSLRAEDTAVYYCARDGLLPLDYWGQGTLVTVSSGGGGSGGGGSGGGGSQSVLTQPPSASGTPGQRVTISCSGGSSNIGGNAVNWYQQLPGTAPKLLIYENNKRPSXVPDRFSGSXSGTSASLAISGLRSEDXADYYCSSYAVSNNFEVLFGGXTKLTVLXEQKLISXXDLSGSAA

SEQ ID NO: 121 - protein, 308 aa, Artificial Sequence
  ICAM-1 scFv antibody
  VARIANT 160: Any amino acid
  VARIANT 191: Any amino acid
  VARIANT 200: Any amino acid
  VARIANT 237: Any amino acid
  VARIANT 251..252: Any amino acid
  VARIANT 258: Any amino acid
  VARIANT 274: Any amino acid
  VARIANT 278..279: Any amino acid
  VARIANT 282..283: Any amino acid
  VARIANT 285: Any amino acid
  VARIANT 288: Any amino acid
  VARIANT 290..292: Any amino acid
  VARIANT 295..296: Any amino acid
  VARIANT 298: Any amino acid
  VARIANT 300: Any amino acid
  VARIANT 302..303: Any amino acid
  VARIANT 307..308: Any amino acid
EVQLLESGGGLVQPGGSLRLSCAASGFTFSNAWMSWVRQAPGKGLEWVAFIWYDGSNKYYADSVKGRFTISRDNSKNTLYLQMNSLRAEDTAVYYCARYSGWYFDYWGQGTLVTVSSGGGGSGGGGSGGGGSQSVLTQPPSASGTPGQRVTISCTGSSSXIGAGYDVHWYQQLPGTAPKLLIYDNNNRPSXVPDRFSGSXSGTSASLAISGLRSEDEADYYCQSYDSSLSAWLFGGXTKLTVLGEQKLISXXDLSGSXAAHHHHHHSPRWPIRXIVSXXTIXXPXFYXVXXXKPXXTXLXRXXAHPXX

SEQ ID NO: 122 - protein, 257 aa, Artificial Sequence
  IgM (2) scFv antibody
  VARIANT 189: Any amino acid
  VARIANT 198: Any amino acid
  VARIANT 235: Any amino acid
  VARIANT 251: Any amino acid
EVQLLESGGGLVQPGGSLRLSCAASGFTFSDYYMSWIRQAPGKGLEWVSAIGSGPYYAHSVRDRFTISRDNSKNTLYLQMNSLRAEDTAVYYCARGGVEASFDYWGQGTLVTVSSGGGGSGGGGSGGGGSQSVLTQPPSASGTPGQRVTISCTGSSSNIGAGYDVHWYQQLPGTAPKLLIYGNTNRPSXVPNRFSGSXSGTSASLAISGLRSEDEADYYCQSYDNDLSGWVFGGXTKLTVLGEQKLISEEXLSGSAA

SEQ ID NO: 123 - protein, 225 aa, Artificial Sequence
  MUC-1 (2) scFv antibody
  VARIANT 212: Any amino acid
EVQLLESGGGLVQPGGSLRLSCAASGFTFKNYWMSWVRQAPGKGLEWVSDISGGGGTTYIADSVKGRFTISRDNSKNTLYLQMNSLRAEDTAVYYCARIHSGSYYFDYWGQGTLVTVSSGGGGSGGGGSGGGGSQSVLTQPPSASGTPGQRVTISCTGSSSNIGAGYDVHWYQQLPGTAPKLLIYKNNQRPSGVPDRFSGSKSGTSASLAIXGLRSEDEADYYCA

SEQ ID NO: 124 - protein, 270 aa, Artificial Sequence
  MUC-1 (4) scFv antibody
  VARIANT 202: Any amino acid
  VARIANT 227: Any amino acid
  VARIANT 239: Any amino acid
  VARIANT 256: Any amino acid
  VARIANT 262..263: Any amino acid
  VARIANT 265: Any amino acid
  VARIANT 267: Any amino acid
EVQLLESGGGLVQPGGSLRLSCAASGFTFKNYWMSWVRQAPGKGLEWVSDISGGGGTTYIADSVKGRFTISRDNSKNTLYLQMNSLRAEDTAVYYCARIHSGSYYFDYWGQGTLVTVSSGGGGSVGGGSGGGGSQSVLTQPPSASGTSGQRVTISCTGSSSNIGAGYDVHWYQQLPGTAPKLLIYKNNQRPSGVPDRFSGSXSGTSASLAISGLRSEDEADYYCAAXDDSLNGPVFGGXTKLTVLGDYKDHDGDYXDHDIDXXDXDXKAA

SEQ ID NO: 125 - protein, 270 aa, Artificial Sequence
  MUC-1 (5) scFv antibody
  VARIANT 219: Any amino acid
  VARIANT 235: Any amino acid
  VARIANT 239: Any amino acid
  VARIANT 246: Any amino acid
  VARIANT 250: Any amino acid
  VARIANT 262: Any amino acid
EVQLLESGGGLVQPGGSLRLSCAASGFTFKNYWMSWVRQAPGKGLEWVSDISGGGGTTYIADSVKGRFTISRDNSKNTLYLQMNSLRAEDTAVYYCARIHSGSYYFDYWGQGTLVTVSSGGGGSGGGGSGGGGSQSVLTQPPSASGTPGQRVTISCTGSSSNIGADYDVHWYQQLPGTAPKLLIYKNNQRPSGVPDRFSGSKSGTSASLAISGLRSEDXADYYCAVWDDSLNGPXFGGXTKLTVLXDYKXHDGDYKDHDIDXKDDDDKAA

SEQ ID NO: 126 - protein, 270 aa, Artificial Sequence
  MUC-1 (6) scFv antibody
  VARIANT 239..240: Any amino acid
  VARIANT 246: Any amino acid
  VARIANT 249: Any amino acid
  VARIANT 264..265: Any amino acid
EVQLLESGGGLVQPGGSLRLSCAASGFTFKNYWMSWVRQAPGKGLEWVSDISGGGGTTYIADSVKGRFTISRDNSRNTLYLQMNSLRAEDTAVYYCARIHSGSYYFDYWGQGTLVTVSSGGGGSGGGGSGGGGSQSVLTQPPSASGTPGQKVTISCTGSSSNIGAGYDVHWYQQLPGTAPKLLIYKNNQRPSGVPDRFSGSRSGTSASLAISGLRSEDEADYYCAAWDDSLNGPVFGGXXKLTVLXDYXDHDGDYKDHDIDYKXXDDKAA

SEQ ID NO: 127 - protein, 112 aa, Artificial Sequence
  MCP-1 (5) scFv antibody
QSVLTQPASASGTPGQRVTISCTGNSSNIGAGYDVHWYQQLPGTAPKLLIYRNNQRPSGVPDRFSGSKSGTSASLAISGLLSEDEADYYCAAWDYSLNGWVFGGGTKLTVLG

SEQ ID NO: 128 - protein, 113 aa, Artificial Sequence
  MCP-1 (6) scFv antibody
QSVLTQPSSASGTPGQRVTISCTGNSSNIGAGYDVHWYQQLPGTAPNLLIYRNNQRPSGVPDRFSGSKSGTSASLAISGLRSEDEADYYCAAWDDSLNGWVFGGGTKLTVLGQ

SEQ ID NO: 129 - protein, 268 aa, Artificial Sequence
  Cystatin C (1) scFv antibody
  VARIANT 191: Any amino acid
  VARIANT 200: Any amino acid
  VARIANT 237: Any amino acid
  VARIANT 247: Any amino acid
  VARIANT 254: Any amino acid
  VARIANT 260..261: Any amino acid
EVQLLESGGGLVQPGGSLRLSCAASGFTFSSYAMNWVRQAPGKGLEWVGLISYDGRTTYYADSVKGRSTISRDNSKNTLYLQMNSLRAEDTAVYYCATTTGTTLDYWGQGTLVTVSSGGGGSGGGGSGGGGSQSVLTQPPSASGTPGQRVTISCTGSSSNIGAGYDVHWYQQLPGTAPKLLIYGNTNRPSXVPDRFSGSXSGTSASLAISGLRSEDEADYYCAAWDDSLYGWVFGGXTKLTVLGDYXDHDGDYXDHDIDXXDDDDKAA

SEQ ID NO: 130 - protein, 236 aa, Artificial Sequence
  Cystatin C (4) scFv antibody
  VARIANT 191: Any amino acid
  VARIANT 200: Any amino acid
  VARIANT 205: Any amino acid
  VARIANT 215: Any amino acid
EVQLLESGGGLVQPGGSLRLSCAASGFTFSSYAMNWVRQAPGKGLEWVGLISYDGRTTYYADSVKGRSTISRDNSKNTLYLQMNSLRAEDTAVYYCATTTGTTLDYWGQGTLVTVSSGGGGSGGGGSGGGGSQSVLTQPPSASGTPGQRVTISCTGSSSNIGAGYDVHWYQQLPGTAPKLLIYGNTNRPSXVPDRFSGSXSGTSXSLAISGLRSXDEADYYCAAWDDSLYGWVFGG

SEQ ID NO: 131 - protein, 187 aa, Artificial Sequence
  Apo-A1 (1) scFv antibody
EVQLLESGGGLVQPGGSLRLSCAASGFTFSNNGMHWVRQAPGKGLEWVSAISASGGSTYYADSVKGRFTISRDNSKNTLYLQMNSLRAEDTAVYYCATHGGSSYDAFDIWGQGTLVTVSSGGGGSGGGGSGGGGSQSVLTQPPSASGTPGQRVTISCTGSSSNIGAGYVVHWYQQLPGTAPKLLIYG

SEQ ID NO: 132 - protein, 196 aa, Artificial Sequence
  Apo-A1 (2) scFv antibody
  VARIANT 166: Any amino acid
EVQLLESGGGLVQPGGSLRLSCAASGFTFRDYYMSWIRQAPGKGLEWVAVTSYDGSKKYYADSVKGRFTISRDNSKNTLYLQMNSLRAEDTAVYYCAKDYADDSIAAPAFDIWGQGTLVTVSSGGGGSGGGGSGGGGSQSVLTQPPSASGTPGQRVTISCTGSSSXIGAGYDVHWYQQLPGTAPKLLIYGNSNRPS

SEQ ID NO: 133 - protein, 315 aa, Artificial Sequence
  Apo-A1 (3) scFv antibody
  VARIANT 3..4: Any amino acid
  VARIANT 221: Any amino acid
  VARIANT 225: Any amino acid
  VARIANT 249..250: Any amino acid
  VARIANT 252: Any amino acid
  VARIANT 266: Any amino acid
  VARIANT 269..271: Any amino acid
  VARIANT 273: Any amino acid
  VARIANT 283..285: Any amino acid
  VARIANT 288..290: Any amino acid
  VARIANT 292..293: Any amino acid
  VARIANT 297..304: Any amino acid
  VARIANT 307..315: Any amino acid
EVXXLESGGGLVQPGGSLRLSCAASGFTFRDYYMSWIRQAPGKGLEWVAVTSYDGSKKYYADSVKGRFTISRDNSKNTLYLQMNSLRAEDTAVYYCAKDYADDSIAAPAFDIWGQGTLVTVSSGGGGSGGGGSGGGGSQSVLTQPPSASGTPGQRVTISCTGSSSNIGAGYDVHWYQQLPGTAPKLLIYGNSNRPSGVPDRFSGSKSGTSASLAISGLRSXDEAXYYCQSYDSSLSVVFGGGTKLTVLXXYXDHDGDYKDHDIDYXDDXXXAXAHHHHHHSPXXXIRXXXSXXTIHXXXXXXXXDWXXXXXXXXX

SEQ ID NO: 134 - protein, 271 aa, Artificial Sequence
  Factor B (2) scFv antibody
  VARIANT 240: Any amino acid
  VARIANT 250: Any amino acid
  VARIANT 263: Any amino acid
  VARIANT 268: Any amino acid
EVQLLESGGGLVQPGGSLRLSCAASGFTFSSYSMNWVRQAPGKGLEWVAVISYDGRFIYYSDSVKGRFTISRDNSKNTLYLQMNSLRAEDTAVYYCARSYGGNLAMDVWGQGTLVTVSSGGGGSGGGGSGGGGSQSVLTQPPSASGTPGQRVTISCTGSSSNIGAGYDVHWYQQLPGTAPKLLIYDNNKRPSGVPDRFSGSNSGTSASLAISGLRSEDEADYYCAAWDDRLNGRVVFGGXTKLTVLGDYXDHDGDYKDHDIDXKDDDXKAA

SEQ ID NO: 135 - protein, 272 aa, Artificial Sequence
  C1 inh. (2) scFv antibody
  VARIANT 203: Any amino acid
  VARIANT 241: Any amino acid
  VARIANT 248: Any amino acid
  VARIANT 251: Any amino acid
  VARIANT 264..265: Any amino acid
  VARIANT 270: Any amino acid
EVQLLESGGGLVQPGGSLRLSCAASGFTFSNAWMSWVRQAPGKGLEWVSAISGSGGSTYYADSVKGRFTISRDNSKNTLYLQMNSLRAEDTAVYYCARNRGNWGTYYFDYWGQGTLVTVSSGGGGSGGGGSGGGGSQSVLTQPPSASGTPGQRVTISCSGSSSNIGSNYVSWYQQLPGTAPKLLIYGSSNRPSGVPDRFSGSXSGTSASLAISGLRSEDEADYYCQSYDSSLSDHVVFGGXTKLTVLXDYXDHDGDYKDHDIDXXDDDDXAA

SEQ ID NO: 136 - protein, 272 aa, Artificial Sequence
  C1 inh. (3) scFv antibody
  VARIANT 164: Any amino acid
  VARIANT 194: Any amino acid
  VARIANT 203: Any amino acid
  VARIANT 220: Any amino acid
  VARIANT 241: Any amino acid
  VARIANT 251: Any amino acid
  VARIANT 262: Any amino acid
  VARIANT 264..265: Any amino acid
  VARIANT 268..270: Any amino acid
EVQLLESGGGLVQPGGSLRLSCAASGFTFSNAWMSWVRQAPGKGLEWVSAISGSGGSTYYADSVKGRFTISRDNSKNTLYLQMNSLRAEDTAVYYCARNRGNWGTYYFDYWGQGTLVTVSSGGGGSGGGGSGGGGSQSVLTQPPSASGTPGQRVTISCSGSSSXIGSNYVSWYQQLPGTAPKLLIYGSSNRPSXVPDRFSGSXSGTSASLAISGLRSEDXADYYCQSYDSSLSDHVVFGGXTKLTVLGDYXDHDGDYKDHDXDXXDDXXXAA

SEQ ID NO: 137 - protein, 263 aa, Artificial Sequence
  C5 (3) scFv antibody
  VARIANT 210: Any amino acid
  VARIANT 232: Any amino acid
  VARIANT 239: Any amino acid
  VARIANT 243: Any amino acid
  VARIANT 255: Any amino acid
  VARIANT 260..261: Any amino acid
EVQLLESGGGLVQPGGSLRLSCAASGFTFSSYGMHWVRQAPGKGLEWVSYISSSGSTIYYADSVKGRFTISRDNSKNTLYLQMNSLRAEDTAVYYCLTLGGYWGQGTLVTVSSGGGGSGGGGSGGGGSQSVLTQPPSASGTPGQRVTISCSGSSSNIGSNTVNWYQQLPGTAPKLLIYSNNQRPSGVPDRFSGSKSGTSASLAISGLRSXDEADYYCQSYDSSLSGWVFGGXTKLTVLXDYKXHDGDYKDHDIDXKDDDXXAA

SEQ ID NO: 138 - protein, 303 aa, Artificial Sequence
  C4 (3) scFv antibody
  VARIANT 161: Any amino acid
  VARIANT 184: Any amino acid
  VARIANT 191: Any amino acid
  VARIANT 200: Any amino acid
  VARIANT 210: Any amino acid
  VARIANT 237: Any amino acid
  VARIANT 247: Any amino acid
  VARIANT 254: Any amino acid
  VARIANT 260..261: Any amino acid
  VARIANT 265: Any amino acid
  VARIANT 268: Any amino acid
  VARIANT 276..277: Any amino acid
  VARIANT 284: Any amino acid
  VARIANT 287..288: Any amino acid
  VARIANT 292..294: Any amino acid
  VARIANT 296..301: Any amino acid
EVQLLESGGGLVQPGGSLRLSCAASGFTFSSYAMSWVRQAPGKGLEWVSAISGSGGSTYYADSVKGRFTISRDNSKNTLYLQMNSLRAEDTAVYYCARGWSTSSFDYWGQGTLVTVSSGGGGSGGGGSGGGGSQSVLTQPPSASGTPGQRVTISCSGSSSXIGNHYVSWYQQLPGTATKLLIYXDDLLPSXVPDRFSGSXSGTSASLAIXGLRSEDEADYYCAAWDDRSGQVLFGGXTKLTVLGDYXDHDGDYXDHDIDXXDDDXKAXAHHHHHHXXRWPIRPXVSXXTIHXXXFXXXXXXKT

SEQ ID NO: 139 - protein, 317 aa, Artificial Sequence
  C4 (4) scFv antibody
  VARIANT 160: Any amino acid
  VARIANT 198..199: Any amino acid
  VARIANT 236: Any amino acid
  VARIANT 240: Any amino acid
  VARIANT 246: Any amino acid
  VARIANT 248..249: Any amino acid
  VARIANT 259: Any amino acid
  VARIANT 262..265: Any amino acid
  VARIANT 267: Any amino acid
  VARIANT 270: Any amino acid
  VARIANT 277: Any amino acid
  VARIANT 279..280: Any amino acid
  VARIANT 285..286: Any amino acid
  VARIANT 289..292: Any amino acid
  VARIANT 294: Any amino acid
  VARIANT 298: Any amino acid
  VARIANT 301..302: Any amino acid
  VARIANT 304: Any amino acid
  VARIANT 306..315: Any amino acid
  VARIANT 317: Any amino acid
EVQLLESGGGLVQPGGSLRLSCAASGFTFSSYSMNWVRQAPGKGLEWVSGISGSGGSTYYADSVKGRFTISRDNSKNTLYLQMNSLRAEDTAVYYCAKHSGYGFDIWGQGTLVTVSSGGGGSGGGGSGGGGSQSVLTQPPSASGTPGQRVTISCSGGASXLGMHFVSWYQQLPGTAPKLLIYYDDLLPSGVPDRFSGXXSGTSASLAISGLRSEDEADYYCAAWDDSLNGWVFGGXTKLXVLGDYXDXXGDYKDHDIDXKDXXXXAXAHXHHHHSPXWXXRPIVXXITXXXXVXLQRXDWXXPXVXXXXXXXXXXPX

SEQ ID NO: 140 - protein, 275 aa, Artificial Sequence
  C3 (3) scFv antibody
  VARIANT 199: Any amino acid
  VARIANT 208: Any amino acid
  VARIANT 223: Any amino acid
  VARIANT 225: Any amino acid
  VARIANT 244: Any amino acid
  VARIANT 254: Any amino acid
  VARIANT 268: Any amino acid
  VARIANT 270: Any amino acid
  VARIANT 272..273: Any amino acid
EVQLLESGGGLVQPGGSLRLSCAASGFTFSSYAMNWVRQAPGKGLEWVANINQDGSTKFYVDSVKGRFTISRDNSKNTLYLQMNSLRAEDTAVYYCARDTGGNYLGGYYYYGMDVWGQGTLVTVSSGGGGSGGGGSGGGGSQSVLTQPPSASGTPGQRVTISCSGSSSNIGSNYVYWYQQLPGTAPKLLIYRNDQRPSXVPDRFSGSXSGTSASLAISGLRSXDXADYYCSSYAGNNNLVFGGXTKLTVLGDYXDHDGDYKDHDIDYXDXDXXAA

SEQ ID NO: 141 - protein, 273 aa, Artificial Sequence
  C3 (4) scFv antibody
  VARIANT 220: Any amino acid
  VARIANT 242: Any amino acid
  VARIANT 250: Any amino acid
  VARIANT 252: Any amino acid
  VARIANT 261: Any amino acid
  VARIANT 269..270: Any amino acid
EVQLLESGGGLVQPGGSLRLSCAASGFTFSDHYMDWVRQAPGKGLEWVSGISGNGATIDYADSVKGRFTISRDNSKNTLYLQMNSLRAEDTAVYYCARPSITAAGSEDAFDLWGQGTLVTVSSGGGGSGGGGSGGGGSQSVLTQPPSASGTPGQRVTISCSGSSSNIGSNYVYWYQQLPGTAPKLLIYGNSNRPSGVPDRFSGSKSGTSASLAISGLRSXDGADYYCQSYDSSLSGWVFGGXTKLTVLGXYXDHDGDYKDXDIDYKDDXXKAA

SEQ ID NO: 142 - protein, 220 aa, Artificial Sequence
  MYOM2 (1) scFv antibody
  VARIANT 158: Any amino acid
  VARIANT 188: Any amino acid
  VARIANT 196..197: Any amino acid
  VARIANT 202: Any amino acid
  VARIANT 207: Any amino acid
EVQLLESGGGLVQPGGSLRLSCAASGFTFSSYAMSWVRQAPGKGLEWVSGISGSGGSTYYADSVKGRFTISRDNSKNTLYLQMNSLRAEDTAVYYCARGVVAGSWGQGTLVTVSSGGGGSGGGGSGGGGSQSVLTQPPSASGTPGQRVTISCSGSSSXIGNNAVNWYQQLPGTAPKLLIYDNNKRPSXVPDRFSGXXSGTSXSLAIXGLRSEDEADYYCA

SEQ ID NO: 143 - protein, 246 aa, Artificial Sequence
  MYOM2 (2) scFv antibody
  VARIANT 192: Any amino acid
  VARIANT 201: Any amino acid
  VARIANT 218: Any amino acid
  VARIANT 238: Any amino acid
EVQLLESGGGLVQPGGSLRLSCAASGFTFSNEWMAWVRQAPGKGLEWVSSISSSSSYIYYADSVKGRFTISRDNSKNTLYLQMNSLRAEDTAVYYCAGTYHDFWSATYWGQGTLVTVSSGGGGSGGGGSGGGGSQSVLTQPPSASGTPGQRVTISCSGSSSNIGSNTVNWYQQLPGTAPKLLIYGNSNRPSXVPDRFSGSXSGTSASLAISGLRSEDXADYYCAAWDDSLNGWVFGGXTKLTVLGD

SEQ ID NO: 144 - protein, 271 aa, Artificial Sequence
  LUM scFv antibody
  VARIANT 203: Any amino acid
  VARIANT 240: Any amino acid
  VARIANT 247: Any amino acid
  VARIANT 250: Any amino acid
  VARIANT 263..265: Any amino acid
  VARIANT 268..269: Any amino acid
EVQLLESGGGLVQPGGSLRLSCAASGFTFSSNYMSWVRQAPGKGLEWVSAISASGTYTYYTDSVNGRFTISRDNSKNTLYLQMNSLRAEDTAVYYCARVNTVGLGTPFDNWGQGTLVTVSSGGGGSGGGGSGGGGSQSVLTQPPSASGTPGQRVTISCSGSSSNIGSNTVNWYQQLPGTAPKLLIYGNRNRPSGVPDRFSGSXSGTSASLAISGLRSEDEADYYCAAWDDSLSGWVFGGXTKLTVLXDYXDHDGDYKDHDIDXXXDDXXAA

SEQ ID NO: 145 - protein, 266 aa, Artificial Sequence
  DUSP9 scFv antibody
  VARIANT 197: Any amino acid
  VARIANT 235: Any amino acid
  VARIANT 245: Any amino acid
  VARIANT 263: Any amino acid
EVQLLESGGGLVQPGGSLRLSCAASGFTFSSYGFHWVRQAPGKGLEWVAVISYDGSNKYYADSVKGRFTISRDNSKNTLYLQMNSLRAEDTAVYYCARGEFGVYWGQGTLVTVSSGGGGSGGGGSGGGGSQSVLTQPPSASGTPGQRVTISCSGSSSNIGSNYVYWYQQLPGTAPKLLIYGNRNRPSGVPDRFSGSXSGTSASLAISGLRSEDEADYYCSSYAGSNNFEVVFGGXTKLTVLGDYXDHDGDYKDHDIDYKDDDXKAA

SEQ ID NO: 146 - protein, 232 aa, Artificial Sequence
  CHX10 (3) scFv antibody
  VARIANT 163: Any amino acid
  VARIANT 193: Any amino acid
  VARIANT 201..202: Any amino acid
  VARIANT 207: Any amino acid
  VARIANT 219: Any amino acid
  VARIANT 226: Any amino acid
EVQLLESGGGLVQPGGSLRLSCAASGFTFSSYAMSWVRQAPGKGLEWVAVISYDGSNKYYADSVKGRFTISRDNSKNTLYLQMNSLRAEDTAVYYCARNYGDSINWFDPWGQGTLVTVSSGGGGSGGGGSGGGGSQSVLTQPPSASGTPGQRVTISCSGSSSXIRSNTVNWYQQLPGTAPKLLIYGNSNRPSXVPDRFSGXXSGTSXSLAISGLRSEDXADYYCAXWDDSLN

SEQ ID NO: 147 - protein, 236 aa, Artificial Sequence
  ATP-5B (1) scFv antibody
  VARIANT 161: Any amino acid
  VARIANT 191: Any amino acid
  VARIANT 199..200: Any amino acid
  VARIANT 217: Any amino acid
EVQLLESGGGLVQPGGSLRLSCAASGFTFSSYAMHWVRQAPGKGLEWVAVISYDGSKTYHADSVEGRFTISRDNSKNTLYLQMNSLRAEDTAVYYCARHLRPYYFDYWGQGTLVTVSSGGGGSGGGGSGGGGSQSVLTQPPSASGTPGQRVTISCSGSSSXIGSNTVNWYQQLPGTAPKLLIYGNSNRPSXVPDRFSGXXSGTSASLAISGLRSEDXADYYCSAWDDRLRGRVFGG

SEQ ID NO: 148 - protein, 324 aa, Artificial Sequence
  ATP-5B (2) scFv antibody
  VARIANT 201: Any amino acid
  VARIANT 207: Any amino acid
  VARIANT 212: Any amino acid
  VARIANT 244: Any amino acid
  VARIANT 254..255: Any amino acid
  VARIANT 258..259: Any amino acid
  VARIANT 268..269: Any amino acid
  VARIANT 271: Any amino acid
  VARIANT 273: Any amino acid
  VARIANT 275: Any amino acid
  VARIANT 278: Any amino acid
  VARIANT 286..289: Any amino acid
  VARIANT 294..307: Any amino acid
  VARIANT 309: Any amino acid
  VARIANT 311..314: Any amino acid
  VARIANT 317..324: Any amino acid
EVQLLESGGGLVQPGGSLRLSCAASGFTFSSYGMHWVRQAPGKGLEWVSLISSASSYIYHADSVKGRFTISRDNSKNTLYLQMNSLRAEDTAVYYCARAGRVCTNGVCHTTFDYWGQGTLVTVSSGGGGSGGGGSGGGGSQSVLTQPPSASGTPGQRVTISCSGDRSNIGSNTVNWYQQLPGTAPKLLIYGNSNRPSGVPXRFSGSXSGTSXSLAISGLRSEDEADYYCQSYDSSLSAVVFGGXTKLTVLGDYXXHDXXYKDHDIDYXXDXDXAXAHXHHHHSPRXXXXPIVSXXXXXXXXXXXXXXLXKXXXXPTXXXXXXXX

SEQ ID NO: 149 - protein, 267 aa, Artificial Sequence
  Sox11a scFv antibody
  VARIANT 203: Any amino acid
  VARIANT 220: Any amino acid
  VARIANT 227: Any amino acid
  VARIANT 236: Any amino acid
  VARIANT 243: Any amino acid
  VARIANT 246: Any amino acid
  VARIANT 252..253: Any amino acid
  VARIANT 259: Any amino acid
  VARIANT 262: Any amino acid
  VARIANT 264: Any amino acid
EVQLLESGGGLVQPGGSLRLSCAASGFTFSDFWMSWVRQAPGKGLEWVSSISGGGGTAFYVDSVKGRFTISRDNSKNTLYLQMNSLRAEDTALYYCARMTDLESGDAFDIWGQGTLVTVSSGGGGSGGGGSGGGGSQSVLTQPPSASGTPGQRVTISCSGSSSNIGSNYVNWYQQLPGTAPKLLIYNDNVRPSGVPDRFSGSXSGTSASLAISGLRSEDXADYYCQXWGTGVFGGXTKLTVLXDYXDHDGDXXDHDIDXKDXDXKAA

SEQ ID NO: 150 - protein, 247 aa, Artificial Sequence
  TBC1D9 (1) scFv antibody
  VARIANT 192..193: Any amino acid
  VARIANT 201..202: Any amino acid
  VARIANT 239: Any amino acid
EVQLLESGGGLVQPGGSLRLSCAASGFTFSSYSMSWVRQAPGKGLEWVAVISYDGSNKYYADSVKGRFTISRDNSKNTLYLQMNSLRAEDTAVYYCARDRTRGSTALDIWGQGTLVTVSSGGGGSGGGGSGGGGSQSVLTQPPSASGTPGQRVTISCSGSSSYIGSNYVYWYQQLPGTAPKLLIYRNNQRPXXVPDRFSGXXSGTSASLAISGLRSEDEADYYCAAWDDSLSGWVFGGXTKLTVLGD

SEQ ID NO: 151 - protein, 250 aa, Artificial Sequence
  UPF3B (1) scFv antibody
  VARIANT 187: Any amino acid
  VARIANT 196: Any amino acid
  VARIANT 206: Any amino acid
  VARIANT 212..213: Any amino acid
  VARIANT 234: Any amino acid
  VARIANT 244: Any amino acid
  VARIANT 248: Any amino acid
EVQLLESGGGLVQPGGSLRLSCAASGFTFSDYYMTWIRQAPGKGLEWVSDISWNGSRTHYADSVKGRFTISRDNSKNTLYLQMNSLRAEDTAVYYCSSHLVYWGQGTLVTVSSGGGGSGGGGSGGGGSQSVLTQPPSASGTPGQRVTISCTGSSSNIGAGYDVHWYQQLPGTAPKLLIYDNNKRPSXVPDRFSGSXSGTSASLAIXGLRSEXXADYYCQTYDSSLSGSVVFGGXTKLTVLGDYXDHDXDY

SEQ ID NO: 152 - protein, 251 aa, Artificial Sequence
  UPF3B (2) scFv antibody
  VARIANT 166: Any amino acid
  VARIANT 197: Any amino acid
  VARIANT 206: Any amino acid
  VARIANT 221: Any amino acid
  VARIANT 243: Any amino acid
EVQLLESGGGLVQPGGSLRLSCAASGFTFSSYAMSWVRQAPGKGLEWVSYISSSSSYANYADSVKGRFTISRDNSKNTLYLQMNSLRAEDTAVYYCARLGVYSGTYLFAFDIWGQGTLVTVSSGGGGSGGGGSGGGGSQSVLTQPPSASGTPGQRVTISCTGSSSXIGAGYDVHWYQQLPGTAPKLLIYGNSNRPSXVPDRFSGSXSGTSASLAISGLRSXDEADYYCQSRDSSLSGWVFGGXTKLTVLGD

SEQ ID NO: 153 - protein, 301 aa, Artificial Sequence
  Apo-A4 (2) scFv antibody
  VARIANT 201: Any amino acid
  VARIANT 238: Any amino acid
  VARIANT 245: Any amino acid
  VARIANT 265..268: Any amino acid
  VARIANT 281: Any amino acid
  VARIANT 285..286: Any amino acid
  VARIANT 288..289: Any amino acid
  VARIANT 293..296: Any amino acid
  VARIANT 298..300: Any amino acid
EVQLLESGGGLVQPGGSLRLSCAASGFTFSDYYMSWVRQAPGKGLEWVSGVSWNGSRTHYADSVKGRFTISRDNSKNTLYLQMNSLRAEDTAVYYCARVAYDIDAFDMWGQGTLVTVSSGGGGSGGGGSGGGGSQSVLTQPPSASGTPGQRVTISCSGSFSNIGSNYVYWYQQLPGTAPKLLIYENNKRPSGVPDRFSGSXSGTSASLAISGLRSEDEADYYCAAWDDSLNGPMFGGXTKLTVLXDYKDHDGDYKDHDIDYKDDXXXXAAHHHHHHSPRWXIRPXXSXXTIHXXXXLXXXD

SEQ ID NO: 154 - protein, 232 aa, Artificial Sequence
  Apo-A4 (3) scFv antibody
  VARIANT 196: Any amino acid
  VARIANT 213: Any amino acid
EVQLLESGGGLVQPGGSLRLSCAASGFTFSSYSMNWVRQAPGKGLEWVSAITGSGNATFYADSVKGRFTISRDNSKNTLYLQMNSLRAEDTAVYYCTTGATTRWGQGTLVTVSSGGGGSGGGGSGGGGSQSVLTQPPSASGTPGQRVTISCSGSRSNIGSNHVFWYQQLPGTAPKLLIYENNKRPSGVPDRFSGSXSGTSASLAISGLRSEDXADYYCAAWDDSLSGWVFGG

SEQ ID NO: 155 - protein, 196 aa, Artificial Sequence
  TBC1D9 (2) scFv antibody
  VARIANT 168: Any amino acid
EVQLLESGGGLVQPGGSLRLSCAASGFTFSNAWMSWVRQAPGKGLEWVSFISSSSSYIYYADSVKGRFTISRDNSKNTLYLQMNSLRAEDTAVYYCARVNLVGCTNGVCNGHDYWGQGTLVTVSSGGGGSGGGGSGGGGSQSVLTQPPSASGTPGQRVTISCSGSSSXIGSNTVNWYQQLPGTAPKLLIYDNNKRP

SEQ ID NO: 156 - protein, 234 aa, Artificial Sequence
  TBC1D9 (3) scFv antibody
  VARIANT 159: Any amino acid
  VARIANT 189: Any amino acid
  VARIANT 198: Any amino acid
  VARIANT 215: Any amino acid
EVQLLESGGGLVQPGGSLRLSCAASGFTFGDYAMSWVRQAPGKGLEWVSAISGSGGSTYYADSVKGRFTISRDNSKNTLYLQMNSLRAEDTAVYYCAKGRTMASHWGQGTLVTVSSGGGGSGGGGSGGGGSQSVLTQPPSASGTPGQRVTISCSGSSSXIGNNHVSWYQQLPGTAPKLLIYGNSNRPSXVPDRFSGSXSGTSASLAISGLRSEDXADYYCAAWDNSLKVWMFGG

SEQ ID NO: 157 - protein, 239 aa, Artificial Sequence
  ORP-3 (1) scFv antibody
  VARIANT 164: Any amino acid
  VARIANT 193..194: Any amino acid
  VARIANT 202..203: Any amino acid
  VARIANT 208: Any amino acid
  VARIANT 220: Any amino acid
EVQLLESGGGLVQPGGSLRLSCAASGFTFSSNYMSWVRQAPGKGLEWVSYISGNSGYTNYADSVKGRFTISRDNSKNTLYLQMNSLRAEDTAVYYCARHAGSYDMYGMDVWGQGTLVTVSSGGGGSGGGGSGGGGSQSVLTQPPSASGTPGQRVTISCSGSTSXIGSHYVYWYQQLPGTAPKLLIYGNSNRPXXVPDRFSGXXSGTSXSLAISGLRSEDXADYYCQSYDSRLSGWVFGG

SEQ ID NO: 158 - protein, 241 aa, Artificial Sequence
  ORP-3 (2) scFv antibody
  VARIANT 158: Any amino acid
  VARIANT 197: Any amino acid
  VARIANT 227: Any amino acid
  VARIANT 234: Any amino acid
EVQLLESGGGLVQPGGSLRLSCAASGFTFSSYAMHWVRQAPGKGLEWVAVISYDGSNKYYADSVKGRFTISRDNSKNTLYLQMNSLRAEDTAVYYCARKSSLDVWGQGTLVTVSSGGGGSGGGGSGGGGSQSVLTQPPSASGTPGQRVTISCSGSSSXIGNNYVSWYQQLPGTAPKLLIYDDNKRPSGVPDRFSGSXSDTSASLAISGLRSEDEADYYCAAWDDSLXGRVFGGXTKLTVLG

SEQ ID NO: 159 - protein, 276 aa, Artificial Sequence
  PKB gamma (1) scFv antibody
EVQLLESGGGLVQPGGSLRLSCAASGFTFGSSYMSWVRQAPGKGLEWVSSISSGGSYTYYADSVKGRFTISRDNSKNTLYLQMNSLRAEDTAVYYCARYHASWGRYLDYWGQGTLVTVSSGGGGSGGGGSGGGGSDIQMTQSPSSLSASVGDRVTITCRASQSISSYLNWYQQKPGKAPKLLIYAASSLQSGVPSRFSGSGSGTDFTLTISSLQPEDFATYYCQQVSSWLSTFGQGTKLEIKRLGDYKDHDGDYKDHDIDYKDDDDKAAAHHHHHH

SEQ ID NO: 160 - protein, 275 aa, Artificial Sequence
  PKB gamma (2) scFv antibody
EVQLLESGGGLVQPGGSLRLSCAASGFTFSYSGMGWVRQAPGKGLEWVSYISSGSYYTGYADSVKGRFTISRDNSKNTLYLQMNSLRAEDTAVYYCARYSGWRHGFDYWGQGTLVTVSSGGGGSGGGGSGGGGSDIQMTQSPSSLSASVGDRVTITCRASQSISSYLNWYQQKPGKAPKLLIYAASSLQSGVPSRFSGSGSGTDFTLTISSLQPEDFATYYCQQATVSPSTFGQGTKLEIKRLGDYKDHDGDYKDHDIDYKDDDDKAAAHHHHHH

SEQ ID NO: 161 - protein, 271 aa, Artificial Sequence
  BTK (3) scFv antibody
EVQLLESGGGLVQPGGSLRLSCAASGFTFSSYAMSWVRQAPGKGLEWVSAISGSGGSTYYADSVKGRFTISRDNSKNTLYLQMNSLRAEDTAVYYCARGYYGMDYWGQGTLVTVSSGGGGSGGGGSGGGGSDIQMTQSPSSLSASVGDRVTITCRASQSISSYLNWYQQKPGKAPKLLIYAASSLQSGVPSRFSGSGSGTDFTLTISSLQPEDFATYYCQQTWYLPTFGQGTKLEIKRLGDYKDHDGDYKDHDIDYKDDDDKAAAHHHHHH

SEQ ID NO: 162 - protein, 272 aa, Artificial Sequence
  BTK (4) scFv antibody
EVQLLESGGGLVQPGGSLRLSCAASGFTFSSYAMSWVRQAPGKGLEWVSAISGSGGSTYYADSVKGRFTISRDNSKNTLYLQMNSLRAEDTAVYYCARGYYGLDYWGQGTLVTVSSGGGGSGGGGSGGGGSDIQMTQSPSSLSASVGDRVTITCRASQSISSYLNWYQQKPGKAPKLLIYAASSLQSGVPSRFSGSGSGTDFTLTISSLQPEDFATYYCQQSGAVPPTFGQGTKLEIKRLGDYKDHDGDYKDHDIDYKDDDDKAAAHHHHHH

SEQ ID NO: 163 - protein, 272 aa, Artificial Sequence
  CDK-2 (1) scFv antibody
EVQLLESGGGLVQPGGSLRLSCAASGFTFSSYAMSWVRQAPGKGLEWVSGISSYYGYTYYADSVKGRFTISRDNSKNTLYLQMNSLRAEDTAVYYCARVYGYYMDYWGQGTLVTVSSGGGGSGGGGSGGGGSDIQMTQSPSSLSASVGDRVTITCRASQSISSYLNWYQQKPGKAPKLLIYAASSLQSGVPSRFSGSGSGTDFTLTISSLQPEDFATYYCQQSSSLYTFGQGTKLEIKRLGDYKDHDGDYKDHDIDYKDDDDKAAAHHHHHH

SEQ ID NO: 164 - protein, 274 aa, Artificial Sequence
  CDK-2 (2) scFv antibody
EVQLLESGGGLVQPGGSLRLSCAASGFTFGSSYMGWVRQAPGKGLEWVSSIYGSSSYTSYADSVKGRFTISRDNSKNTLYLQMNSLRAEDTAVYYCARWYWSWSSFDYWGQGTLVTVSSGGGGSGGGGSGGGGSDIQMTQSPSSLSASVGDRVTITCRASQSISSYLNWYQQKPGKAPKLLIYAASSLQSGVPSRFSGSGSGTDFTLTISSLQPEDFATYYCQQGGWPYTFGQGTKLEIKRLGDYKDHDGDYKDHDIDYKDDDDKAAAHHHHHH

SEQ ID NO: 165 - protein, 270 aa, Artificial Sequence
  GM-CSF (4) scFv antibody
EVQLLESGGGLVQPGGSLRLSCAASGFTFSSYGMSWVRQAPGKGLEWVSYIGSGYYYTSYADSVKGRFTISRDNSKNTLYLQMNSLRAEDTAVYYCARGGYFDYWGQGTLVTVSSGGGGSGGGGSGGGGSDIQMTQSPSSLSASVGDRVTITCRASQSISSYLNWYQQKPGKAPKLLIYAASSLQSGVPSRFSGSGSGTDFTLTISSLQPEDFATYYCQQGYHLPTFGQGTKLEIKRLGDYKDHDGDYKDHDIDYKDDDDKAAAHHHHHH

SEQ ID NO: 166 - protein, 278 aa, Artificial Sequence
  FASN (1) scFv antibody
EVQLLESGGGLVQPGGSLRLSCAASGFTFGYSGMSWVRQAPGKGLEWVSYIGGGYGSTSYADSVKGRFTISRDNSKNTLYLQMNSLRAEDTAVYYCARWSWHHGSYTMDYWGQGTLVTVSSGGGGSGGGGSGGGGSDIQMTQSPSSLSASVGDRVTITCRASQSISSYLNWYQQKPGKAPKLLIYAASSLQSGVPSRFSGSGSGTDFTLTISSLQPEDFATYYCQQGYSWFLPTFGQGTKLEIKRLGDYKDHDGDYKDHDIDYKDDDDKAAAHHHHHH

SEQ ID NO: 167 - protein, 274 aa, Artificial Sequence
  FASN (2) scFv antibody
EVQLLESGGGLVQPGGSLRLSCAASGFTFSGSSMSWVRQAPGKGLEWVSSIYYGSGYTYYADSVKGRFTISRDNSKNTLYLQMNSLRAEDTAVYYCARGTYLDYWGQGTLVTVSSGGGGSGGGGSGGGGSDIQMTQSPSSLSASVGDRVTITCRASQSISSYLNWYQQKPGKAPKLLIYAASSLQSGVPSRFSGSGSGTDFTLTISSLQPEDFATYYCQQHTWWSSYLHTFGQGTKLEIKRLGDYKDHDGDYKDHDIDYKDDDDKAAAHHHHHH

SEQ ID NO: 168 - protein, 270 aa, Artificial Sequence
  GAK (1) scFv antibody
EVQLLESGGGLVQPGGSLRLSCAASGFTFGSSYMSWVRQAPGKGLEWVSSISSSSYGTYYADSVKGRFTISRDNSKNTLYLQMNSLRAEDTAVYYCARNPGFDYWGQGTLVTVSSGGGGSGGGGSGGGGSDIQMTQSPSSLSASVGDRVTITCRASQSISSYLNWYQQKPGKAPKLLIYAASSLQSGVPSRFSGSGSGTDFTLTISSLQPEDFATYYCQQHYWLPTFGQGTKLEIKRLGDYKDHDGDYKDHDIDYKDDDDKAAAHHHHHH

SEQ ID NO: 169 - protein, 278 aa, Artificial Sequence
  GAK (3) scFv antibody
EVQLLESGGGLVQPGGSLRLSCAASGFTFGSSYMSWVRQAPGKGLEWVSGISSSGYGTYYADSVKGRFTISRDNSKNTLYLQMNSLRAEDTAVYYCARGYYHYGYAGFYFDYWGQGTLVTVSSGGGGSGGGGSGGGGSDIQMTQSPSSLSASVGDRVTITCRASQSISSYLNWYQQKPGKAPKLLIYAASSLQSGVPSRFSGSGSGTDFTLTISSLQPEDFATYYCQQSAYLFTFGQGTKLEIKRLGDYKDHDGDYKDHDIDYKDDDDKAAAHHHHHH

SEQ ID NO: 170 - protein, 274 aa, Artificial Sequence
  HADH2 (1) scFv antibody
EVQLLESGGGLVQPGGSLRLSCAASGFTFSSYYMSWVRQAPGKGLEWVSSISSGGYGTGYADSVKGRFTISRDNSKNTLYLQMNSLRAEDTAVYYCARSYGWGPLDYWGQGTLVTVSSGGGGSGGGGSGGGGSDIQMTQSPSSLSASVGDRVTITCRASQSISSYLNWYQQKPGKAPKLLIYAASSLQSGVPSRFSGSGSGTDFTLTISSLQPEDFATYYCQQGYNWPYTFGQGTKLEIKRLGDYKDHDGDYKDHDIDYKDDDDKAAAHHHHHH

SEQ ID NO: 171 - protein, 274 aa, Artificial Sequence
  HADH2 (3) scFv antibody
EVQLLESGGGLVQPGGSLRLSCAASGFTFGSSYMSWVRQAPGKGLEWVSSISSYGYYTGYADSVKGRFTISRDNSKNTLYLQMNSLRAEDTAVYYCARSYGSWYFDYWGQGTLVTVSSGGGGSGGGGSGGGGSDIQMTQSPSSLSASVGDRVTITCRASQSISSYLNWYQQKPGKAPKLLIYAASSLQSGVPSRFSGSGSGTDFTLTISSLQPEDFATYYCQQGFVGPSTFGQGTKLEIKRLGDYKDHDGDYKDHDIDYKDDDDKAAAHHHHHH

SEQ ID NO: 172 - protein, 274 aa, Artificial Sequence
  IL-6 (7) scFv antibody
EVQLLESGGGLVQPGGSLRLSCAASGFTFGYSSMGWVRQAPGKGLEWVSGISSYGYGTYYADSVKGRFTISRDNSKNTLYLQMNSLRAEDTAVYYCARYHSGWGMDYWGQGTLVTVSSGGGGSGGGGSGGGGSDIQMTQSPSSLSASVGDRVTITCRASQSISSYLNWYQQKPGKAPKLLIYAASSLQSGVPSRFSGSGSGTDFTLTISSLQPEDFATYYCQQSFAYLHTFGQGTKLEIKRLGDYKDHDGDYKDHDIDYKDDDDKAAAHHHHHH

SEQ ID NO: 173 - protein, 265 aa, Artificial Sequence
  Keratin 19 (1) scFv antibody
  VARIANT 237: Any amino acid
  VARIANT 241: Any amino acid
  VARIANT 252: Any amino acid
EVQLLESGGGLVQPGGSLRLSCAASGFTFGYYYMYWVRQAPGKGLEWVSSIGSSGSSTSYADSVKGRFTISRDNSKNTLYLQMNSLRAEDTAVYYCARGHAFFDYWGQGTLVTVSSGGGGSGGGGSGGGGSDIQMTQSPSSLSASVGDRVTITCRASQSISSYLNWYQQKPGKAPKLLIYAASSLQSGVPSRFSGSGSGTDFTLTISSLQPEDFATYYCQQVWYWPPTFGQGTKLEXKRLXDYKDHDGDYKXHDIDYKDDDDKAA

SEQ ID NO: 174 - protein, 267 aa, Artificial Sequence
  Keratin 19 (2) scFv antibody
  VARIANT 235: Any amino acid
  VARIANT 243: Any amino acid
EVQLLESGGGLVQPGGSLRLSCAASGFTFYGSSMSWVRQAPGKGLEWVSYIGSDSSYTSYADSVKGRFTISRDNSKNTLYLQMNSLRAEDTAVYYCARSYWSVFDYWGQGTLVTVSSGGGGSGGGGSGGGGSDIQMTQSPSSLSASVGDRVTITCRASQSISSYLNWYQQKPGKAPKLLIYAASSLQSGVPSRFSGSGSGTDFTLTISSLQPEDFATYYCQQSYWSWLPTFGQGXKLEIKRLXDYKDHDGDYKDHDIDYKDDDDKAA

SEQ ID NO: 175 - protein, 274 aa, Artificial Sequence
  KSYK (1) scFv antibody
EVQLLESGGGLVQPGGSLRLSCAASGFTFSSYAMSWVRQAPGKGLEWVSGISSGYYYTYYADSVKGRFTISRDNSKNTLYLQMNSLRAEDTAVYYCARVGWYWNGLDYWGQGTLVTVSSGGGGSGGGGSGGGGSDIQMTQSPSSLSASVGDRVTITCRASQSISSYLNWYQQKPGKAPKLLIYAASSLQSGVPSRFSGSGSGTDFTLTISSLQPEDFATYYCQQSSVLPTFGQGTKLEIKRLGDYKDHDGDYKDHDIDYKDDDDKAAAHHHHHH

SEQ ID NO: 176 - protein, 272 aa, Artificial Sequence; identical to SEQ ID NO: 162
  KSYK (2) scFv antibody

SEQ ID NO: 177 - protein, 275 aa, Artificial Sequence
  MATK (2) scFv antibody
EVQLLESGGGLVQPGGSLRLSCAASGFTFYGYSMYWVRQAPGKGLEWVSYIGSYSGSTSYADSVKGRFTISRDNSKNTLYLQMNSLRAEDTAVYYCARYYHYYHTWLDYWGQGTLVTVSSGGGGSGGGGSGGGGSDIQMTQSPSSLSASVGDRVTITCRASQSISSYLNWYQQKPGKAPKLLIYAASSLQSGVPSRFSGSGSGTDFTLTISSLQPEDFATYYCQQGFYPFTFGQGTKLEIKRLGDYKDHDGDYKDHDIDYKDDDDKAAAHHHHHH

SEQ ID NO: 178 - protein, 287 aa, Artificial Sequence
  MATK (3) scFv antibody
EVQLLESGGGLVQPGGSLRLSCAASGFTFSSYAMSWVRQAPGKGLEWVSAISGSGGSTYYADSVKGRFTISRDNSKNTLYLQMNSLRAEDTAVYYCARYPFYDYSVVGGRWPSYGIDYWGQGTLVTVSSGGGGSGGGGSGGGGSDIQMTQSPSSLSASVGDRVTITCRASQSISSYLNWYQQKPGKAPKLLIYAASSLQSGVPSRFSGSGSGTDFTLTISSLQPEDFATYYCQQWNSGVWLHTFGQGTKLEIKRLGDYKDHDGDYKDHDIDYKDDDDKAAAHHHHHH

SEQ ID NO: 179 - protein, 275 aa, Artificial Sequence
  MAPK1 (1) scFv antibody
EVQLLESGGGLVQPGGSLRLSCAASGFTFSSSYMYWVRQAPGKGLEWVSSISGGGYGTYYADSVKGRFTISRDNSKNTLYLQMNSLRAEDTAVYYCARAYPYVGSGIDYWGQGTLVTVSSGGGGSGGGGSGGGGSDIQMTQSPSSLSASVGDRVTITCRASQSISSYLNWYQQKPGKAPKLLIYAASSLQSGVPSRFSGSGSGTDFTLTISSLQPEDFATYYCQQGYSLPTFGQGTKLEIKRLGDYKDHDGDYKDHDIDYKDDDDKAAAHHHHHH

SEQ ID NO: 180 - protein, 273 aa, Artificial Sequence
  MAPK1 (2) scFv antibody
EVQLLESGGGLVQPGGSLRLSCAASGFTFYYSYMGWVRQAPGKGLEWVSSISGSSYGTSYADSVKGRFTISRDNSKNTLYLQMNSLRAEDTAVYYCARGTGSVIDYWGQGTLVTVSSGGGGSGGGGSGGGGSDIQMTQSPSSLSASVGDRVTITCRASQSISSYLNWYQQKPGKAPKLLIYAASSLQSGVPSRFSGSGSGTDFTLTISSLQPEDFATYYCQQSYSTPYTFGQGTKLEIKRLGDYKDHDGDYKDHDIDYKDDDDKAAAHHHHHH

SEQ ID NO: 181 - protein, 275 aa, Artificial Sequence
  MAPK8 (1) scFv antibody
EVQLLESGGGLVQPGGSLRLSCAASGFTFYGSSMSWVRQAPGKGLEWVSGISGYGYYTSYADSVKGRFTISRDNSKNTLYLQMNSLRAEDTAVYYCARYSASGFYFDYWGQGTLVTVSSGGGGSGGGGSGGGGSDIQMTQSPSSLSASVGDRVTITCRASQSISSYLNWYQQKPGKAPKLLIYAASSLQSGVPSRFSGSGSGTDFTLTISSLQPEDFATYYCQQSYVYPLTFGQGTKLEIKRLGDYKDHDGDYKDHDIDYKDDDDKAAAHHHHHH

SEQ ID NO: 182 - protein, 275 aa, Artificial Sequence
  MAPK8 (2) scFv antibody
EVQLLESGGGLVQPGGSLRLSCAASGFTFSSYSMGWVRQAPGKGLEWVSGISSYGYYTYYADSVKGRFTISRDNSKNTLYLQMNSLRAEDTAVYYCARHYTTGYYIDYWGQGTLVTVSSGGGGSGGGGSGGGGSDIQMTQSPSSLSASVGDRVTITCRASQSISSYLNWYQQKPGKAPKLLIYAASSLQSGVPSRFSGSGSGTDFTLTISSLQPEDFATYYCQQGFNVPYTFGQGTKLEIKRLGDYKDHDGDYKDHDIDYKDDDDKAAAHHHHHH

SEQ ID NO: 183 - protein, 271 aa, Artificial Sequence
  MAPK8 (3) scFv antibody
EVQLLESGGGLVQPGGSLRLSCAASGFTFSGSGMYWVRQAPGKGLEWVSYISGSGSYTDYADSVKGRFTISRDNSKNTLYLQMNSLRAEDTAVYYCARSGSFDYWGQGTLVTVSSGGGGSGGGGSGGGGSDIQMTQSPSSLSASVGDRVTITCRASQSISSYLNWYQQKPGKAPKLLIYAASSLQSGVPSRFSGSGSGTDFTLTISSLQPEDFATYYCQQVSSSLYTFGQGTKLEIKRLGDYKDHDGDYKDHDIDYKDDDDKAAAHHHHHH

SEQ ID NO: 184 - protein, 275 aa, Artificial Sequence
  Osteopontin (1) scFv antibody
EVQLLESGGGLVQPGGSLRLSCAASGFTFSSYAMSWVRQAPGKGLEWVSAISGSGGSTYYADSVKGRFTISRDNSKNTLYLQMNSLRAEDTAVYYCARAYSWFDYWGQGTLVTVSSGGGGSGGGGSGGGGSDIQMTQSPSSLSASVGDRVTITCRASQSISSYLNWYQQKPGKAPKLLIYAASSLQSGVPSRFSGSGSGTDFTLTISSLQPEDFATYYCQQVAGYYHYPFTFGQGTKLEIKRLGDYKDHDGDYKDHDIDYKDDDDKAAAHHHHHH

SEQ ID NO: 185 - protein, 273 aa, Artificial Sequence
  Osteopontin (2) scFv antibody
EVQLLESGGGLVQPGGSLRLSCAASGFTFSSYAMSWVRQAPGKGLEWVSAISGSGGSTYYADSVKGRFTISRDNSKNTLYLQMNSLRAEDTAVYYCARYHYNYYMDYWGQGTLVTVSSGGGGSGGGGSGGGGSDIQMTQSPSSLSASVGDRVTITCRASQSISSYLNWYQQKPGKAPKLLIYAASSLQSGVPSRFSGSGSGTDFTLTISSLQPEDFATYYCQQYSYLLTFGQGTKLEIKRLGDYKDHDGDYKDHDIDYKDDDDKAAAHHHHHH

SEQ ID NO: 186 - protein, 274 aa, Artificial Sequence
  P85A (1) scFv antibody
EVQLLESGGGLVQPGGSLRLSCAASGFTFYSSSMSWVRQAPGKGLEWVSGISSSYSYTYYADSVKGRFTISRDNSKNTLYLQMNSLRAEDTAVYYCARYSSYGSFDYWGQGTLVTVSSGGGGSGGGGSGGGGSDIQMTQSPSSLSASVGDRVTITCRASQSISSYLNWYQQKPGKAPKLLIYAASSLQSGVPSRFSGSGSGTDFTLTISSLQPEDFATYYCQQSSAFPSTFGQGTKLEIKRLGDYKDHDGDYKDHDIDYKDDDDKAAAHHHHHH

SEQ ID NO: 187 - protein, 273 aa, Artificial Sequence
  P85A (2) scFv antibody
EVQLLESGGGLVQPGGSLRLSCAASGFTFSSYSMGWVRQAPGKGLEWVSYIGYSSGSTYYADSVKGRFTISRDNSKNTLYLQMNSLRAEDTAVYYCARDRYSYFDYWGQGTLVTVSSGGGGSGGGGSGGGGSDIQMTQSPSSLSASVGDRVTITCRASQSISSYLNWYQQKPGKAPKLLIYAASSLQSGVPSRFSGSGSGTDFTLTISSLQPEDFATYYCQQWSYGPLTFGQGTKLEIKRLGDYKDHDGDYKDHDIDYKDDDDKAAAHHHHHH

SEQ ID NO: 188 - protein, 272 aa, Artificial Sequence
  PTK6 scFv antibody
EVQLLESGGGLVQPGGSLRLSCAASGFTFSSYAMSWVRQAPGKGLEWVSAISGSGGSTYYADSVKGRFTISRDNSKNTLYLQMNSLRAEDTAVYYCARGGHGLDYWGQGTLVTVSSGGGGSGGGGSGGGGSDIQMTQSPSSLSASVGDRVTITCRASQSISSYLNWYQQKPGKAPKLLIYAASSLQSGVPSRFSGSGSGTDFTLTISSLQPEDFATYYCQQGSDVPFTFGQGTKLEIKRLGDYKDHDGDYKDHDIDYKDDDDKAAAHHHHHH

SEQ ID NO: 189 - protein, 277 aa, Artificial Sequence
  PTPN1 (1) scFv antibody
EVQLLESGGGLVQPGGSLRLSCAASGFTFGYSSMSWVRQAPGKGLEWVSSISYSGSGTGYADSVKGRFTISRDNSKNTLYLQMNSLRAEDTAVYYCARGWYPHPGHWYIDYWGQGTLVTVSSGGGGSGGGGSGGGGSDIQMTQSPSSLSASVGDRVTITCRASQSISSYLNWYQQKPGKAPKLLIYAASSLQSGVPSRFSGSGSGTDFTLTISSLQPEDFATYYCQQHFSLPTFGQGTKLEIKRLGDYKDHDGDYKDHDIDYKDDDDKAAAHHHHHH

SEQ ID NO: 190 - protein, 272 aa, Artificial Sequence
  PTPN1 (3) scFv antibody
EVQLLESGGGLVQPGGSLRLSCAASGFTFSYYSMSWVRQAPGKGLEWVSSISSSGGGTSYADSVKGRFTISRDNSKNTLYLQMNSLRAEDTAVYYCARWFSSAFDYWGQGTLVTVSSGGGGSGGGGSGGGGSDIQMTQSPSSLSASVGDRVTITCRASQSISSYLNWYQQKPGKAPKLLIYAASSLQSGVPSRFSGSGSGTDFTLTISSLQPEDFATYYCQQGVPPYTFGQGTKLEIKRLGDYKDHDGDYKDHDIDYKDDDDKAAAHHHHHH

SEQ ID NO: 191 - protein, 273 aa, Artificial Sequence
  RPS6KA2 (1) scFv antibody
EVQLLESGGGLVQPGGSLRLSCAASGFTFSSYAMSWVRQAPGKGLEWVSAISGSGGSTYYADSVKGRFTISRDNSKNTLYLQMNSLRAEDTAVYYCARRYSGYFDYWGQGTLVTVSSGGGGSGGGGSGGGGSDIQMTQSPSSLSASVGDRVTITCRASQSISSYLNWYQQKPGKAPKLLIYAASSLQSGVPSRFSGSGSGTDFTLTISSLQPEDFATYYCQQNWWGLPTFGQGTKLEIKRLGDYKDHDGDYKDHDIDYKDDDDKAAAHHHHHH

SEQ ID NO: 192 - protein, 272 aa, Artificial Sequence
  RPS6KA2 (2) scFv antibody
EVQLLESGGGLVQPGGSLRLSCAASGFTFYGSYMYWVRQAPGKGLEWVSGISPYSSSTYYADSVKGRFTISRDNSKNTLYLQMNSLRAEDTAVYYCARGFPFIDYWGQGTLVTVSSGGGGSGGGGSGGGGSDIQMTQSPSSLSASVGDRVTITCRASQSISSYLNWYQQKPGKAPKLLIYAASSLQSGVPSRFSGSGSGTDFTLTISSLQPEDFATYYCQQNGVGLLTFGQGTKLEIKRLGDYKDHDGDYKDHDIDYKDDDDKAAAHHHHHH

SEQ ID NO: 193 - protein, 275 aa, Artificial Sequence
  STAP2 (1) scFv antibody
EVQLLESGGGLVQPGGSLRLSCAASGFTFYGGSMYWVRQAPGKGLEWVSSISSGGSYTYYADSVKGRFTISRDNSKNTLYLQMNSLRAEDTAVYYCARVGYDTMDYWGQGTLVTVSSGGGGSGGGGSGGGGSDIQMTQSPSSLSASVGDRVTITCRASQSISSYLNWYQQKPGKAPKLLIYAASSLQSGVPSRFSGSGSGTDFTLTISSLQPEDFATYYCQQRWYWWYLFTFGQGTKLEIKRLGDYKDHDGDYKDHDIDYKDDDDKAAAHHHHHH

SEQ ID NO: 194 - protein, 275 aa, Artificial Sequence
  STAP2 (4) scFv antibody
EVQLLESGGGLVQPGGSLRLSCAASGFTFYYGGMSWVRQAPGKGLEWVSSIYYSSGSTSYADSVKGRFTISRDNSKNTLYLQMNSLRAEDTAVYYCARHGWDDNGFDYWGQGTLVTVSSGGGGSGGGGSGGGGSDIQMTQSPSSLSASVGDRVTITCRASQSISSYLNWYQQKPGKAPKLLIYAASSLQSGVPSRFSGSGSGTDFTLTISSLQPEDFATYYCQQVYSYLFTFGQGTKLEIKRLGDYKDHDGDYKDHDIDYKDDDDKAAAHHHHHH

SEQ ID NO: 195 - protein, 277 aa, Artificial Sequence
  STAT1 (1) scFv antibody
EVQLLESGGGLVQPGGSLRLSCAASGFTFGYYGMSWVRQAPGKGLEWVSGIYGSYYSTYYADSVKGRFTISRDNSKNTLYLQMNSLRAEDTAVYYCARHSWDYYFDYWGQGTLVTVSSGGGGSGGGGSGGGGSDIQMTQSPSSLSASVGDRVTITCRASQSISSYLNWYQQKPGKAPKLLIYAASSLQSGVPSRFSGSGSGTDFTLTISSLQPEDFATYYCQQYHYGYGSPYTFGQGTKLEIKRLGDYKDHDGDYKDHDIDYKDDDDKAAAHHHHHH

SEQ ID NO: 196 - protein, 276 aa, Artificial Sequence
  STAT1 (2) scFv antibody
EVQLLESGGGLVQPGGSLRLSCAASGFTFSYSSMYWVRQAPGKGLEWVSSISSYGHSTYYADSVKGRFTISRDNSKNTLYLQMNSLRAEDTAVYYCARSWGYYHYLDYWGQGTLVTVSSGGGGSGGGGSGGGGSDIQMTQSPSSLSASVGDRVTITCRASQSISSYLNWYQQKPGKAPKLLIYAASSLQSGVPSRFSGSGSGTDFTLTISSLQPEDFATYYCQQTWHPYPSTFGQGTKLEIKRLGDYKDHDGDYKDHDIDYKDDDDKAAAHHHHHH

SEQ ID NO: 197 - protein, 280 aa, Artificial Sequence
  TENS4 scFv antibody
EVQLLESGGGLVQPGGSLRLSCAASGFTFSGYSMSWVRQAPGKGLEWVSSISSGYYSTYYADSVKGRFTISRDNSKNTLYLQMNSLRAEDTAVYYCARVYWGSPWFNPAMDYWGQGTLVTVSSGGGGSGGGGSGGGGSDIQMTQSPSSLSASVGDRVTITCRASQSISSYLNWYQQKPGKAPKLLIYAASSLQSGVPSRFSGSGSGTDFTLTISSLQPEDFATYYCQQWYYWVPPTFGQGTKLEIKRLGDYKDHDGDYKDHDIDYKDDDDKAAAHHHHHH

SEQ ID NO: 198 - protein, 261 aa, Artificial Sequence
  TNFRSF14 (1) scFv antibody
  VARIANT 194: Any amino acid
  VARIANT 203: Any amino acid
  VARIANT 228: Any amino acid
  VARIANT 239: Any amino acid
  VARIANT 253..254: Any amino acid
EVQLLESGGGLVQPGGSLRLSCAASGFTFSSFAMHWVRQAPGKGLEWVSAISGSGGSTYYADSVKGRFTISRDNSKNTLYLQMNSLRAEDTAVYYCASRSTLYYYYGMDVWGQGTLVTVSSGGGGSGGGGSGGGGSQSVLTQPPSASGTPGQRVTISCSGSTSNIGNSHVYWYQQLPGTAPKLLIYGNSNRPSXVPDRFSGSXSGTSASLAISGLRSEDEADYYCSSXAGSNNLVFGGXTKLTVLGEQKLISXXDLSGSAA

SEQ ID NO: 199 - protein, 258 aa, Artificial Sequence
  TNFRSF14 (2) scFv antibody
  VARIANT 236: Any amino acid
  VARIANT 243: Any amino acid
  VARIANT 250..252: Any amino acid
EVQLLESGGGLVQPGGSLRLSCAASGFTFSSYAMSWVRQAPGKGLEWVSAISGSGGSTYYADSVKGRFTISRDNSKNTLYLQMNSLRAEDTAVYYCARSPYYGMDVWGQGTLVTVSSGGGGSGGGGSGGGGSQSVLTQPPSASGTPGQRVTISCTGSSSNIGAGYDVHWYQQLPGTAPKLLIYRNDQRPSGVPDRFSGSKSGTSASLAISGLRSEDEADYYCSSYGGRDNVVFGGXTKLTVLXEQKLISXXXLSGSAA

SEQ ID NO: 200 - protein, 255 aa, Artificial Sequence
  TNFRSF3 (1) scFv antibody
  VARIANT 213: Any amino acid
  VARIANT 233: Any amino acid
  VARIANT 248: Any amino acid
EVQLLESGGGLVQPGGSLRLSCAASGFTFSDYYMSWIRQAPGKGLEWVSGLSGSAGRTHYADSVRGRFTISRDNSKNTLYLQMNSLRAEDTAMYYCASSLFDYWGQGTLVTVSSGGGGSGGGGSGGGGSQSVLTQPPSASGTPGQRVTISCSGSSSNIGSNYVYWYQQLPGTAPKLLIYSNNQRPSGVPDRFSGSKSGTSASLAISGLRSEDXADYYCAAWDDSLNAVVFGGXTKLTVLGEQKLISEXDLSGSAA

SEQ ID NO: 201 - protein, 262 aa, Artificial Sequence
  TNFRSF3 (2) scFv antibody
  VARIANT 240: Any amino acid
  VARIANT 254..256: Any amino acid
EVQLLESGGGLVQPGGSLRLSCAASGFTFSDYYMNWVRQAPGKGLEWVSGINWNSDDIDYVDSVKGRFTISRDNSKNTLYLQMNSLRAEDTAMYYCAIDSRYSSGWSFEYWGQGTLVTVSSGGGGSGGGGSGGGGSQSVLTQPPSASGTPGQRVTISCSGSTSNIGNSHVYWYQQLPGTAPKLLIYSNNQRPSGVPDRFSGSKSGTSASLAISGLRSEDEADYYCQSYDSSLSGVVFGGXTKLTVLGEQKLISXXXLSGSAA

SEQ ID NO: 202 - protein, 271 aa, Artificial Sequence
  UBC9 (1) scFv antibody
EVQLLESGGGLVQPGGSLRLSCAASGFTFGYGSMSWVRQAPGKGLEWVSSISYYGSSTGYADSVKGRFTISRDNSKNTLYLQMNSLRAEDTAVYYCARGVVWLDYWGQGTLVTVSSGGGGSGGGGSGGGGSDIQMTQSPSSLSASVGDRVTITCRASQSISSYLNWYQQKPGKAPKLLIYAASSLQSGVPSRFSGSGSGTDFTLTISSLQPEDFATYYCQQGPYPPTFGQGTKLEIKRLGDYKDHDGDYKDHDIDYKDDDDKAAAHHHHHH

SEQ ID NO: 203 - protein, 278 aa, Artificial Sequence
  UBC9 (2) scFv antibody
EVQLLESGGGLVQPGGSLRLSCAASGFTFYGSSMSWVRQAPGKGLEWVSGISYSSSYTSYADSVKGRFTISRDNSKNTLYLQMNSLRAEDTAVYYCARATSYWFTYFGVIDYWGQGTLVTVSSGGGGSGGGGSGGGGSDIQMTQSPSSLSASVGDRVTITCRASQSISSYLNWYQQKPGKAPKLLIYAASSLQSGVPSRFSGSGSGTDFTLTISSLQPEDFATYYCQQSWSPHTFGQGTKLEIKRLGDYKDHDGDYKDHDIDYKDDDDKAAAHHHHHH

SEQ ID NO: 204 - protein, 277 aa, Artificial Sequence
  UBE2C (1) scFv antibody
EVQLLESGGGLVQPGGSLRLSCAASGFTFGYYSMSWVRQAPGKGLEWVSAISGSGGSTYYADSVKGRFTISRDNSKNTLYLQMNSLRAEDTAVYYCARGGFWYGGYMDYWGQGTLVTVSSGGGGSGGGGSGGGGSDIQMTQSPSSLSASVGDRVTITCRASQSISSYLNWYQQKPGKAPKLLIYAASSLQSGVPSRFSGSGSGTDFTLTISSLQPEDFATYYCQQSSGPHPFTFGQGTKLEIKRLGDYKDHDGDYKDHDIDYKDDDDKAAAHHHHHH

SEQ ID NO: 205 - protein, 273 aa, Artificial Sequence
  UBE2C (2) scFv antibody
EVQLLESGGGLVQPGGSLRLSCAASGFTFSSYSMSWVRQAPGKGLEWVSSISGYSYGTYYADSVKGRFTISRDNSKNTLYLQMNSLRAEDTAVYYCARWHHPYYFDYWGQGTLVTVSSGGGGSGGGGSGGGGSDIQMTQSPSSLSASVGDRVTITCRASQSISSYLNWYQQKPGKAPKLLIYAASSLQSGVPSRFSGSGSGTDFTLTISSLQPEDFATYYCQQGSVLSTFGQGTKLEIKRLGDYKDHDGDYKDHDIDYKDDDDKAAAHHHHHH

SEQ ID NO: 206 - protein, 270 aa, Artificial Sequence
  UCHL5 scFv antibody
EVQLLESGGGLVQPGGSLRLSCAASGFTFSSYAMSWVRQAPGKGLEWVSAISGSGGSTYYADSVKGRFTISRDNSKNTLYLQMNSLRAEDTAVYYCARGWSLDYWGQGTLVTVSSGGGGSGGGGSGGGGSDIQMTQSPSSLSASVGDRVTITCRASQSISSYLNWYQQKPGKAPKLLIYAASSLQSGVPSRFSGSGSGTDFTLTISSLQPEDFATYYCQQVHFLPTFGQGTKLEIKRLGDYKDHDGDYKDHDIDYKDDDDKAAAHHHHHH

SEQ ID NO: 207 - protein, 276 aa, Artificial Sequence
  Her2/ErbB2 (4) scFv antibody
EVQLVESGGGLVQPGGSLRLSCAASGFNIKDTYIHWVRQAPGKGLEWVARIYPTNGYTRYADSVKGRFTISADTSKNTAYLQMNSLRAEDTAVYYCSRWGGDGFYAMDYWGQGTLVTVSSGGGGSGGGGSGGGGSDIQMTQSPSSLSASVGDRVTITCRASQDVNTAVAWYQQKPGKAPKLLIYSASFLYSGVPSRFSGSRSGTDFTLTISSLQPEDFATYYCQQHYTTPPTFGQGTKVEIKRLGDYKDHDGDYKDHDIDYKDDDDKAAAHHHHHH

SEQ ID NO: 208 - protein, 274 aa, Artificial Sequence
  EGFR scFv antibody
QVQLKQSGPGLVQPSQSLSITCTVSGFSLTNYGVHWVRQSPGKGLEWLGVIWSGGNTDYNTPFTSRLSINKDNSKSQVFFKMNSLQSNDTAIYYCARALTYYDYEFAYWGQGTLVTVSSGGGGSGGGGSGGGGSDILLTQSPVILSVSPGERVSFSCRASQSIGTNIHWYQQRTNGSPRLLIKYASESISGIPSRFSGSGSGTDFTLSINSVESEDIADYYCQQNNNWPTTFGAGTKLELKLGDYKDHDGDYKDHDIDYKDDDDKAAAHHHHHH

SEQ ID NO: 209 - protein, 275 aa, Artificial Sequence
  CHP1 (1) scFv antibody
EVQLLESGGGLVQPGGSLRLSCAASGFTFYYYGMSWVRQAPGKGLEWVSGIGYGYGTYADSVKGRFTISRDNSKNTLYLQMNSLRAEDTAVYYCARDSYSSPYYSLDYWGQGTLVTVSSGGGGSGGGGSGGGGSDIQMTQSPSSLSASVGDRVTITCRASQSISSYLNWYQQKPGKAPKLLIYAASSLQSGVPSRFSGSGSGTDFTLTISSLQPEDFATYYCQQSYSTPYTFGQGTKLEIKRLGDYKDHDGDYKDHDIDYKDDDDKAAAHHHHHH

SEQ ID NO: 210 - protein, 276 aa, Artificial Sequence
  CHP1 (2) scFv antibody
EVQLLESGGGLVQPGGSLRLSCAASGFTFYSYSMGWVRQAPGKGLEWVSSIGGSGYYTYYADSVKGRFTISRDNSKNTLYLQMNSLRAEDTAVYYCARNYNYYYGSYIDYWGQGTLVTVSSGGGGSGGGGSGGGGSDIQMTQSPSSLSASVGDRVTITCRASQSISSYLNWYQQKPGKAPKLLIYAASSLQSGVPSRFSGSGSGTDFTLTISSLQPEDFATYYCQQSFYPHTFGQGTKLEIKRLGDYKDHDGDYKDHDIDYKDDDDKAAAHHHHHH

SEQ ID NO: 211 - protein, 277 aa, Artificial Sequence
  AGAP-2 (1) scFv antibody
EVQLLESGGGLVQPGGSLRLSCAASGFTFGSYSMHWVRQAPGKGLEWVSSISSYSYSTYYADSVKGRFTISRDNSKNTLYLQMNSLRAEDTAVYYCARGGAYYTNPFDYWGQGTLVTVSSGGGGSGGGGSGGGGSDIQMTQSPSSLSASVGDRVTITCRASQSISSYLNWYQQKPGKAPKLLIYAASSLQSGVPSRFSGSGSGTDFTLTISSLQPEDFATYYCQQPGFYSLPTFGQGTKLEIKRLGDYKDHDGDYKDHDIDYKDDDDKAAAHHHHHH

SEQ ID NO: 212 - protein, 277 aa, Artificial Sequence
  AGAP-2 (3) scFv antibody
EVQLLESGGGLVQPGGSLRLSCAASGFTFGGYSMYWVRQAPGKGLEWVSYISSGSSSTYYADSVKGRFTISRDNSKNTLYLQMNSLRAEDTAVYYCARGGGWYDYDFFDYWGQGTLVTVSSGGGGSGGGGSGGGGSDIQMTQSPSSLSASVGDRVTITCRASQSISSYLNWYQQKPGKAPKLLIYAASSLQSGVPSRFSGSGSGTDFTLTISSLQPEDFATYYCQQSYSTPYTFGQGTKLEIKRLGDYKDHDGDYKDHDIDYKDDDDKAAAHHHHHH

SEQ ID NO: 213 - protein, 274 aa, Artificial Sequence
  MAPK9 (1) scFv antibody
EVQLLESGGGLVQPGGSLRLSCAASGFTFSYGDMSWVRQAPGKGLEWVSGISSGGSSTYYADSVKGRFTISRDNSKNTLYLQMNSLRAEDTAVYYCARGYGYAWYFDYWGQGTLVTVSSGGGGSGGGGSGGGGSDIQMTQSPSSLSASVGDRVTITCRASQSISSYLNWYQQKPGKAPKLLIYAASSLQSGVPSRFSGSGSGTDFTLTISSLQPEDFATYYCQQWWHPYTFGQGTKLEIKRLGDYKDHDGDYKDHDIDYKDDDDKAAAHHHHHH

SEQ ID NO: 214 - protein, 274 aa, Artificial Sequence
  MAPK9 (2) scFv antibody
EVQLLESGGGLVQPGGSLRLSCAASGFTFGYGGMSWVRQAPGKGLEWVSSIYGSSSSTYYADSVKGRFTISRDNSKNTLYLQMNSLRAEDTAVYYCARHWRSVYFDYWGQGTLVTVSSGGGGSGGGGSGGGGSDIQMTQSPSSLSASVGDRVTITCRASQSISSYLNWYQQKPGKAPKLLIYAASSLQSGVPSRFSGSGSGTDFTLTISSLQPEDFATYYCQQGWGSPLTFGQGTKLEIKRLGDYKDHDGDYKDHDIDYKDDDDKAAAHHHHHH

SEQ ID NO: 215 - protein, 270 aa, Artificial Sequence
  MAPK9 (5) scFv antibody
EVQLLESGGGLVQPGGSLRLSCAASGFTFSGSYMSWVRQAPGKGLEWVSSIYGYSSYTYYADSVKGRFTISRDNSKNTLYLQMNSLRAEDTAVYYCARGSYLDYWGQGTLVTVSSGGGGSGGGGSGGGGSDIQMTQSPSSLSASVGDRVTITCRASQSISSYLNWYQQKPGKAPKLLIYAASSLQSGVPSRFSGSGSGTDFTLTISSLQPEDFATYYCQQYWYPYTFGQGTKLEIKRLGDYKDHDGDYKDHDIDYKDDDDKAAAHHHHHH

SEQ ID NO: 216 - protein, 273 aa, Artificial Sequence
  PAK-7 (1) scFv antibody
  VARIANT 228: Any amino acid
EVQLLESGGGLVQPGGSLRLSCAASGFTFSGYSMSWVRQAPGKGLEWVSSISSSYSSTYYADSVKGRFTISRDNSKNTLYLQMNSLRAEDTAVYYCARGSFGFDYWGQGTLVTVSSGGGGSGGGGSGGGGSDIQMTQSPSSLSASVGDRVTITCRASQSISSYLNWYQQKPGKAPKLLIYAASSLQSGVPSRFSGSGSGTDFTLTISSLQPEDFATYYCQQYYYGVLXTFGQGTKLEIKRLGDYKDHDGDYKDHDIDYKDDDDKAAAHHHHHH

SEQ ID NO: 217 - protein, 272 aa, Artificial Sequence
  PAK-7 (2) scFv antibody
EVQLLESGGGLVQPGGSLRLSCAASGFTFYYSSMSWVRQAPGKGLEWVSGISGGYSSTYYADSVKGRFTISRDNSKNTLYLQMNSLRAEDTAVYYCARGFGVMDYWGQGTLVTVSSGGGGSGGGGSGGGGSDIQMTQSPSSLSASVGDRVTITCRASQSISSYLNWYQQKPGKAPKLLIYAASSLQSGVPSRFSGSGSGTDFTLTISSLQPEDFATYYCQQSYSTPYTFGQGTKLEIKRLGDYKDHDGDYKDHDIDYKDDDDKAAAHHHHHH

SEQ ID NO: 218 - protein, 277 aa, Artificial Sequence
  GEM (1) scFv antibody
EVQLLESGGGLVQPGGSLRLSCAASGFTFYYSYMYWVRQAPGKGLEWVSAISGSGGSTYYADSVKGRFTISRDNSKNTLYLQMNSLRAEDTAVYYCARFYYYGFNGSFDYWGQGTLVTVSSGGGGSGGGGSGGGGSDIQMTQSPSSLSASVGDRVTITCRASQSISSYLNWYQQKPGKAPKLLIYAASSLQSGVPSRFSGSGSGTDFTLTISSLQPEDFATYYCQQSYSTPYTFGQGTKLEIKRLGDYKDHDGDYKDHDIDYKDDDDKAAAHHHHHH

SEQ ID NO: 219 - protein, 276 aa, Artificial Sequence
  GEM (2) scFv antibody
EVQLLESGGGLVQPGGSLRLSCAASGFTFYGSYMGWVRQAPGKGLEWVSGISSYSYSTYYADSVKGRFTISRDNSKNTLYLQMNSLRAEDTAVYYCARYSPFHWYFDYWGQGTLVTVSSGGGGSGGGGSGGGGSDIQMTQSPSSLSASVGDRVTITCRASQSISSYLNWYQQKPGKAPKLLIYAASSLQSGVPSRFSGSGSGTDFTLTISSLQPEDFATYYCQQSFRDPPHTFGQGTKLEIKRLGDYKDHDGDYKDHDIDYKDDDDKAAAHHHHHH

SEQ ID NO: 220 - protein, 276 aa, Artificial Sequence
  GNAI3 (1) scFv antibody
EVQLLESGGGLVQPGGSLRLSCAASGFTFSSYAMSWVRQAPGKGLEWVSYISGGYGYTSYADSVKGRFTISRDNSKNTLYLQMNSLRAEDTAVYYCARVVYDSSYFDYWGQGTLVTVSSGGGGSGGGGSGGGGSDIQMTQSPSSLSASVGDRVTITCRASQSISSYLNWYQQKPGKAPKLLIYAASSLQSGVPSRFSGSGSGTDFTLTISSLQPEDFATYYCQQAYYGFPSTFGQGTKLEIKRLGDYKDHDGDYKDHDIDYKDDDDKAAAHHHHHH

SEQ ID NO: 221 - protein, 274 aa, Artificial Sequence
  GNAI3 (2) scFv antibody
EVQLLESGGGLVQPGGSLRLSCAASGFTFSSSSMSWVRQAPGKGLEWVSGISGYGGGTGYADSVKGRFTISRDNSKNTLYLQMNSLRAEDTAVYYCARSSYFVYFDYWGQGTLVTVSSGGGGSGGGGSGGGGSDIQMTQSPSSLSASVGDRVTITCRASQSISSYLNWYQQKPGKAPKLLIYAASSLQSGVPSRFSGSGSGTDFTLTISSLQPEDFATYYCQQPYGYPYTFGQGTKLEIKRLGDYKDHDGDYKDHDIDYKDDDDKAAAHHHHHH

SEQ ID NO: 222 - protein, 273 aa, Artificial Sequence
  MAP2K6 (3) scFv antibody
EVQLLESGGGLVQPGGSLRLSCAASGFTFSSYAMSWVRQAPGKGLEWVSAISGSGGSTYYADSVKGRFTISRDNSKNTLYLQMNSLRAEDTAVYYCARSHTVYFDYWGQGTLVTVSSGGGGSGGGGSGGGGSDIQMTQSPSSLSASVGDRVTITCRASQSISSYLNWYQQKPGKAPKLLIYAASSLQSGVPSRFSGSGSGTDFTLTISSLQPEDFATYYCQQSYSTPYTFGQGTKLEIKRLGDYKDHDGDYKDHDIDYKDDDDKAAAHHHHHH

SEQ ID NO: 223 - protein, 275 aa, Artificial Sequence
  MAP2K6 (4) scFv antibody
EVQLLESGGGLVQPGGSLRLSCAASGFTFSSYAMSWVRQAPGKGLEWVSGISSYGGSTSYADSVKGRFTISRDNSKNTLYLQMNSLRAEDTAVYYCARFGHAFPAFDYWGQGTLVTVSSGGGGSGGGGSGGGGSDIQMTQSPSSLSASVGDRVTITCRASQSISSYLNWYQQKPGKAPKLLIYAASSLQSGVPSRFSGSGSGTDFTLTISSLQPEDFATYYCQQSYSTPYTFGQGTKLEIKRLGDYKDHDGDYKDHDIDYKDDDDKAAAHHHHHH

SEQ ID NO: 224 - protein, 272 aa, Artificial Sequence
  MAP2K2 (1) scFv antibody
EVQLLESGGGLVQPGGSLRLSCAASGFTFGYYSMSWVRQAPGKGLEWVSSISSSSSYTYYADSVKGRFTISRDNSKNTLYLQMNSLRAEDTAVYYCARHYSSFDYWGQGTLVTVSSGGGGSGGGGSGGGGSDIQMTQSPSSLSASVGDRVTITCRASQSISSYLNWYQQKPGKAPKLLIYAASSLQSGVPSRFSGSGSGTDFTLTISSLQPEDFATYYCQQSYWYPFTFGQGTKLEIKRLGDYKDHDGDYKDHDIDYKDDDDKAAAHHHHHH

SEQ ID NO: 225 - protein, 273 aa, Artificial Sequence
  MAP2K2 (2) scFv antibody
EVQLLESGGGLVQPGGSLRLSCAASGFTFYYSSMSWVRQAPGKGLEWVSSIYGGGGSTSYADSVKGRFTISRDNSKNTLYLQMNSLRAEDTAVYYCARGPGHVIDYWGQGTLVTVSSGGGGSGGGGSGGGGSDIQMTQSPSSLSASVGDRVTITCRASQSISSYLNWYQQKPGKAPKLLIYAASSLQSGVPSRFSGSGSGTDFTLTISSLQPEDFATYYCQQSYYVPFTFGQGTKLEIKRLGDYKDHDGDYKDHDIDYKDDDDKAAAHHHHHH

SEQ ID NO: 226 - protein, 272 aa, Artificial Sequence
  KRAS scFv antibody
EVQLLESGGGLVQPGGSLRLSCAASGFTFSGSYMYWVRQAPGKGLEWVSSIGSSYGYTYYADSVKGRFTISRDNSKNTLYLQMNSLRAEDTAVYYCARYGYFSFDYWGQGTLVTVSSGGGGSGGGGSGGGGSDIQMTQSPSSLSASVGDRVTITCRASQSISSYLNWYQQKPGKAPKLLIYAASSLQSGVPSRFSGSGSGTDFTLTISSLQPEDFATYYCQQDHYLSTFGQGTKLEIKRLGDYKDHDGDYKDHDIDYKDDDDKAAAHHHHHH

SEQ ID NO: 227 - protein, 274 aa, Artificial Sequence
  PTPRO (1) scFv antibody
  VARIANT 163..164: Any amino acid
  VARIANT 185: Any amino acid
EVQLLESGGGLVQPGGSLRLSCAASGFTFSYSGMGWVRQAPGKGLEWVSYISSYGYSTYYADSVKGRFTISRDNSKNTLYLQMNSLRAEDTAVYYCARSVSGGVIDYWGQGTLVTVSSGGGGSGGGGSGGGGSDIQMTQSPSSLSASVGDRVTITCRASQSIXXYLNWYQQKPGKAPKLLIYAAXSLQSGVPSRFSGSGSGTDFTLTISSLQPEDFATYYCQQWVHYPYTFGQGTKLEIKRLGDYKDHDGDYKDHDIDYKDDDDKAAAHHHHHH

SEQ ID NO: 228 - protein, 273 aa, Artificial Sequence
  PTPRO (4) scFv antibody
  VARIANT 34: Any amino acid
EVQLLESGGGLVQPGGSLRLSCAASGFTFSGYYXSWVRQAPGKGLEWVSSISGGSYSKSYADSVKGRFTISRDNSKNTLYLQMNSLRAEDTAVYYCARYSYYFDYWGQGTLVTVSSGGGGSGGGGSGGGGSDIQMTQSPSSLSASVGDRVTITCRASQSISSYLNWYQQKPGKAPKLLIYAASSLQSGVPSRFSGSGSGTDFTLTISSLQPEDFATYYCQQYAAYGLLTFGQGTKLEIKRLGDYKDHDGDYKDHDIDYKDDDDKAAAHHHHHH

SEQ ID NO: 229 - protein, 282 aa, Artificial Sequence
  PAR-6B (1) scFv antibody
EVQLLESGGGLVQPGGSLRLSCAASGFTFSSYAMSWVRQAPGKGLEWVSAISGSGGSTYYADSVKGRFTISRDNSKNTLYLQMNSLRAEDTAVYYCARWNVWGHWGGPYSGVGLDYWGQGTLVTVSSGGGGSGGGGSGGGGSDIQMTQSPSSLSASVGDRVTITCRASQSISSYLNWYQQKPGKAPKLLIYAASSLQSGVPSRFSGSGSGTDFTLTISSLQPEDFATYYCQQPYYPFTFGQGTKLEIKRLGDYKDHDGDYKDHDIDYKDDDDKAAAHHHHHH

SEQ ID NO: 230 - protein, 273 aa, Artificial Sequence
  PAR-6B (2) scFv antibody
EVQLLESGGGLVQPGGSLRLSCAASGFTFSYYYMYWVRQAPGKGLEWVSYIYSYYYGTYYADSVKGRFTISRDNSKNTLYLQMNSLRAEDTAVYYCARYAYYLDYWGQGTLVTVSSGGGGSGGGGSGGGGSDIQMTQSPSSLSASVGDRVTITCRASQSISSYLNWYQQKPGKAPKLLIYAASSLQSGVPSRFSGSGSGTDFTLTISSLQPEDFATYYCQQHWSYGLYTFGQGTKLEIKRLGDYKDHDGDYKDHDIDYKDDDDKAAAHHHHHH

SEQ ID NO: 231 - protein, 276 aa, Artificial Sequence
  PRD-14 (1) scFv antibody
EVQLLESGGGLVQPGGSLRLSCAASGFTFGSYGMSWVRQAPGKGLEWVSSIYSGYSYTYYADSVKGRFTISRDNSKNTLYLQMNSLRAEDTAVYYCARHGPYRGPGSMDYWGQGTLVTVSSGGGGSGGGGSGGGGSDIQMTQSPSSLSASVGDRVTITCRASQSISSYLNWYQQKPGKAPKLLIYAASSLQSGVPSRFSGSGSGTDFTLTISSLQPEDFATYYCQQSWWLLTFGQGTKLEIKRLGDYKDHDGDYKDHDIDYKDDDDKAAAHHHHHH

SEQ ID NO: 232 - protein, 273 aa, Artificial Sequence
  PRD-14 (2) scFv antibody
EVQLLESGGGLVQPGGSLRLSCAASGFTFYSGGMSWVRQAPGKGLEWVSSISGGYYYTYYADSVKGRFTISRDNSKNTLYLQMNSLRAEDTAVYYCARYVYGVGIDYWGQGTLVTVSSGGGGSGGGGSGGGGSDIQMTQSPSSLSASVGDRVTITCRASQSISSYLNWYQQKPGKAPKLLIYAASSLQSGVPSRFSGSGSGTDFTLTISSLQPEDFATYYCQQGYWLFTFGQGTKLEIKRLGDYKDHDGDYKDHDIDYKDDDDKAAAHHHHHH

SEQ ID NO: 233 - protein, 273 aa, Artificial Sequence
  PRD-14 (3) scFv antibody
EVQLLESGGGLVQPGGSLRLSCAASGFTFSGYSMYWVRQAPGKGLEWVSSIYGYYGGTSYADSVKGRFTISRDNSKNTLYLQMNSLRAEDTAVYYCARGHPWFYMDYWGQGTLVTVSSGGGGSGGGGSGGGGSDIQMTQSPSSLSASVGDRVTITCRASQSISSYLNWYQQKPGKAPKLLIYAASSLQSGVPSRFSGSGSGTDFTLTISSLQPEDFATYYCQQSYWLYTFGQGTKLEIKRLGDYKDHDGDYKDHDIDYKDDDDKAAAHHHHHH

SEQ ID NO: 234 - protein, 276 aa, Artificial Sequence
  TOPBP-1 (1) scFv antibody
EVQLLESGGGLVQPGGSLRLSCAASGFTFSGSSMSWVRQAPGKGLEWVSSISSGGSSTGYADSVKGRFTISRDNSKNTLYLQMNSLRAEDTAVYYCARFSWGHWSSFFDYWGQGTLVTVSSGGGGSGGGGSGGGGSDIQMTQSPSSLSASVGDRVTITCRASQSISSYLNWYQQKPGKAPKLLIYAASSLQSGVPSRFSGSGSGTDFTLTISSLQPEDFATYYCQQVYDLLTFGQGTKLEIKRLGDYKDHDGDYKDHDIDYKDDDDKAAAHHHHHH

SEQ ID NO: 235 - protein, 270 aa, Artificial Sequence
  TOPBP-1 (2) scFv antibody
  VARIANT 158..159: Any amino acid
  VARIANT 177..180: Any amino acid
  VARIANT 220..222: Any amino acid
  VARIANT 224..225: Any amino acid
EVQLLESGGGLVQPGGSLRLSCAASGFTFGSSSMSWVRQAPGKGLEWVSSISYGSSSTSYADSVKGRFTISRDNSKNTLYLQMNSLRAEDTAVYYCARGGYGFDYWGQGTLVTVSSGGGGSGGGGSGGGGSDIQMTQSPSSLSASVGDRVTITCRASXXLNWYQQKPGKAPKLLIYXXXXSLQSGVPSRFSGSGSGTDFTLTISSLQPEDFATYYCQQGXXXGXXTFGQGTKLEIKRLGDYKDHDGDYKDHDIDYKDDDDKAAAHHHHHH

SEQ ID NO: 236 - protein, 272 aa, Artificial Sequence
  USP-7 (1) scFv antibody
EVQLLESGGGLVQPGGSLRLSCAASGFTFGSSSMYWVRQAPGKGLEWVSSISYYGYSTYYADSVKGRFTISRDNSKNTLYLQMNSLRAEDTAVYYCARGSGIDYWGQGTLVTVSSGGGGSGGGGSGGGGSDIQMTQSPSSLSASVGDRVTITCRASQSISSYLNWYQQKPGKAPKLLIYAASSLQSGVPSRFSGSGSGTDFTLTISSLQPEDFATYYCQQWSVYGLYTFGQGTKLEIKRLGDYKDHDGDYKDHDIDYKDDDDKAAAHHHHHH

SEQ ID NO: 237 - protein, 283 aa, Artificial Sequence
  USP-7 (4) scFv antibody
EVQLLESGGGLVQPGGSLRLSCAASGFTFSSYAMSWVRQAPGKGLEWVSAISGSGGSTYYADSVKGRFTISRDNSKNTLYLQMNSLRAEDTAVYYCARVYSYPGPSSWGYFSSIDYWGQGTLVTVSSGGGGSGGGGSGGGGSDIQMTQSPSSLSASVGDRVTITCRASQSISSYLNWYQQKPGKAPKLLIYAASSLQSGVPSRFSGSGSGTDFTLTISSLQPEDFATYYCQQSYGYPHTFGQGTKLEIKRLGDYKDHDGDYKDHDIDYKDDDDKAAAHHHHHH

SEQ ID NO: 238 - protein, 275 aa, Artificial Sequence
  PARP-1 scFv antibody
EVQLLESGGGLVQPGGSLRLSCAASGFTFSGSGMGWVRQAPGKGLEWVSYIGYYSSGTYYADSVKGRFTISRDNSKNTLYLQMNSLRAEDTAVYYCARHHSFGYLDYWGQGTLVTVSSGGGGSGGGGSGGGGSDIQMTQSPSSLSASVGDRVTITCRASQSISSYLNWYQQKPGKAPKLLIYAASSLQSGVPSRFSGSGSGTDFTLTISSLQPEDFATYYCQQGVHWSLHTFGQGTKLEIKRLGDYKDHDGDYKDHDIDYKDDDDKAAAHHHHHH

SEQ ID NO: 239 - protein, 273 aa, Artificial Sequence
  GRIP-2 (1) scFv antibody
EVQLLESGGGLVQPGGSLRLSCAASGFTFSSYAMSWVRQAPGKGLEWVSAISGSGGSTYYADSVKGRFTISRDNSKNTLYLQMNSLRAEDTAVYYCARIHFYGLDYWGQGTLVTVSSGGGGSGGGGSGGGGSDIQMTQSPSSLSASVGDRVTITCRASQSISSYLNWYQQKPGKAPKLLIYAASSLQSGVPSRFSGSGSGTDFTLTISSLQPEDFATYYCQQSYSTPYTFGQGTKLEIKRLGDYKDHDGDYKDHDIDYKDDDDKAAAHHHHHH

SEQ ID NO: 240 - protein, 270 aa, Artificial Sequence
  GRIP-2 (7) scFv antibody
EVQLLESGGGLVQPGGSLRLSCAASGFTFSSYAMSWVRQAPGKGLEWVSAISGSGGSTYYADSVKGRFTISRDNSKNTLYLQMNSLRAEDTAVYYCARGSYMDYWGQGTLVTVSSGGGGSGGGGSGGGGSDIQMTQSPSSLSASVGDRVTITCRASQSISSYLNWYQQKPGKAPKLLIYAASSLQSGVPSRFSGSGSGTDFTLTISSLQPEDFATYYCQQSYGPPTFGQGTKLEIKRLGDYKDHDGDYKDHDIDYKDDDDKAAAHHHHHH

SEQ ID NO: 241 - protein, 272 aa, Artificial Sequence
  GRIP-2 (8) scFv antibody
EVQLLESGGGLVQPGGSLRLSCAASGFTFSSYAMSWVRQAPGKGLEWVSAISGSGGSTYYADSVKGRFTISRDNSKNTLYLQMNSLRAEDTAVYYCARHSGPFFDYWGQGTLVTVSSGGGGSGGGGSGGGGSDIQMTQSPSSLSASVGDRVTITCRASQSISSYLNWYQQKPGKAPKLLIYAASSLQSGVPSRFSGSGSGTDFTLTISSLQPEDFATYYCQQGYSLHTFGQGTKLEIKRLGDYKDHDGDYKDHDIDYKDDDDKAAAHHHHHH

SEQ ID NO: 242 - protein, 279 aa, Artificial Sequence
  MAD2L1 (1) scFv antibody
  VARIANT 229..232: Any amino acid
EVQLLESGGGLVQPGGSLRLSCAASGFTFGSSYMGWVRQAPGKGLEWVSGISGGGYGTYYADSVKGRFTISRDNSKNTLYLQMNSLRAEDTAVYYCARAPGGHYYGYFYFDYWGQGTLVTVSSGGGGSGGGGSGGGGSDIQMTQSPSSLSASVGDRVTITCRASQSISSYLNWYQQKPGKAPKLLIYAASSLQSGVPSRFSGSGSGTDFTLTISSLQPEDFATYYCQQXXXXAHTFGQGTKLEIKRLGDYKDHDGDYKDHDIDYKDDDDKAAAHHHHHH

SEQ ID NO: 243 - protein, 274 aa, Artificial Sequence
  MAD2L1 (2) scFv antibody
  VARIANT 227..228: Any amino acid
EVQLLESGGGLVQPGGSLRLSCAASGFTFYYSSMYWVRQAPGKGLEWVSGISSGGSGTYYADSVKGRFTISRDNSKNTLYLQMNSLRAEDTAVYYCARSFSYSSYLDYWGQGTLVTVSSGGGGSGGGGSGGGGSDIQMTQSPSSLSASVGDRVTITCRASQSISSYLNWYQQKPGKAPKLLIYAASSLQSGVPSRFSGSGSGTDFTLTISSLQPEDFATYYCQQGGXXPTFGQGTKLEIKRLGDYKDHDGDYKDHDIDYKDDDDKAAAHHHHHH

SEQ ID NO: 244 - protein, 278 aa, Artificial Sequence
  HsHec1 (2) scFv antibody
EVQLLESGGGLVQPGGSLRLSCAASGFTFSGSSMYWVRQAPGKGLEWVSGIGSYGGYTYYADSVKGRFTISRDNSKNTLYLQMNSLRAEDTAVYYCARDGTAVGSYFYFDYWGQGTLVTVSSGGGGSGGGGSGGGGSDIQMTQSPSSLSASVGDRVTITCRASQSISSYLNWYQQKPGKAPKLLIYAASSLQSGVPSRFSGSGSGTDFTLTISSLQPEDFATYYCQQYYYYPHTFGQGTKLEIKRLGDYKDHDGDYKDHDIDYKDDDDKAAAHHHHHH

SEQ ID NO: 245 - protein, 277 aa, Artificial Sequence
  HsHec1 (3) scFv antibody
EVQLLESGGGLVQPGGSLRLSCAASGFTFSSYAMSWVRQAPGKGLEWVSGIGSGGYYTSYADSVKGRFTISRDNSKNTLYLQMNSLRAEDTAVYYCARFYFVASPGGNLDYWGQGTLVTVSSGGGGSGGGGSGGGGSDIQMTQSPSSLSASVGDRVTITCRASQSISSYLNWYQQKPGKAPKLLIYAASSLQSGVPSRFSGSGSGTDFTLTISSLQPEDFATYYCQQYSSPPTFGQGTKLEIKRLGDYKDHDGDYKDHDIDYKDDDDKAAAHHHHHH

SEQ ID NO: 246 - protein, 270 aa, Artificial Sequence
  Spindly (1) scFv antibody
EVQLLESGGGLVQPGGSLRLSCAASGFTFSSYYMSWVRQAPGKGLEWVSSIDYSSYYTGYADSVKGRFTISRDNSKNTLYLQMNSLRAEDTAVYYCARGSYFDYWGQGTLVTVSSGGGGSGGGGSGGGGSDIQMTQSPSSLSASVGDRVTITCRASQSISSYLNWYQQKPGKAPKLLIYAASSLQSGVPSRFSGSGSGTDFTLTISSLQPEDFATYYCQQGSPLYTFGQGTKLEIKRLGDYKDHDGDYKDHDIDYKDDDDKAAAHHHHHH

SEQ ID NO: 247 - protein, 280 aa, Artificial Sequence
  Spindly (2) scFv antibody
EVQLLESGGGLVQPGGSLRLSCAASGFTFYSYYMGWVRQAPGKGLEWVSSISYSGSGTYYADSVKGRFTISRDNSKNTLYLQMNSLRAEDTAVYYCARASYGTSYYYGYTIDYWGQGTLVTVSSGGGGSGGGGSGGGGSDIQMTQSPSSLSASVGDRVTITCRASQSISSYLNWYQQKPGKAPKLLIYAASSLQSGVPSRFSGSGSGTDFTLTISSLQPEDFATYYCQQSYAGPSTFGQGTKLEIKRLGDYKDHDGDYKDHDIDYKDDDDKAAAHHHHHH

SEQ ID NO: 248 - protein, 278 aa, Artificial Sequence
  PTPRK (1) scFv antibody
EVQLLESGGGLVQPGGSLRLSCAASGFTFSYSGMSWVRQAPGKGLEWVSSIGGSSSYTYYADSVKGRFTISRDNSKNTLYLQMNSLRAEDTAVYYCARYSWGYYDAIDYWGQGTLVTVSSGGGGSGGGGSGGGGSDIQMTQSPSSLSASVGDRVTITCRASQSISSYLNWYQQKPGKAPKLLIYAASSLQSGVPSRFSGSGSGTDFTLTISSLQPEDFATYYCQQSWWGHALYTFGQGTKLEIKRLGDYKDHDGDYKDHDIDYKDDDDKAAAHHHHHH

SEQ ID NO: 249 - protein, 275 aa, Artificial Sequence
  PTPRK (7) scFv antibody
EVQLLESGGGLVQPGGSLRLSCAASGFTFYYSSMSWVRQAPGKGLEWVSSIGYGSGYTYYADSVKGRFTISRDNSKNTLYLQMNSLRAEDTAVYYCARVGASGSFDYWGQGTLVTVSSGGGGSGGGGSGGGGSDIQMTQSPSSLSASVGDRVTITCRASQSISSYLNWYQQKPGKAPKLLIYAASSLQSGVPSRFSGSGSGTDFTLTISSLQPEDFATYYCQQYHYYSLYTFGQGTKLEIKRLGDYKDHDGDYKDHDIDYKDDDDKAAAHHHHHH

SEQ ID NO: 250 - protein, 276 aa, Artificial Sequence
  PTPRK (8) scFv antibody
EVQLLESGGGLVQPGGSLRLSCAASGFTFSSSSMGWVRQAPGKGLEWVSYISGYSYYTYYADSVKGRFTISRDNSKNTLYLQMNSLRAEDTAVYYCARSSGTYGYYIDYWGQGTLVTVSSGGGGSGGGGSGGGGSDIQMTQSPSSLSASVGDRVTITCRASQSISSYLNWYQQKPGKAPKLLIYAASSLQSGVPSRFSGSGSGTDFTLTISSLQPEDFATYYCQQGSYFPSTFGQGTKLEIKRLGDYKDHDGDYKDHDIDYKDDDDKAAAHHHHHH

SEQ ID NO: 251 - protein, 273 aa, Artificial Sequence
  PTPRT (1) scFv antibody
EVQLLESGGGLVQPGGSLRLSCAASGFTFGGYSMSWVRQAPGKGLEWVSGISYGYGSTYYADSVKGRFTISRDNSKNTLYLQMNSLRAEDTAVYYCARGGPSYSMDYWGQGTLVTVSSGGGGSGGGGSGGGGSDIQMTQSPSSLSASVGDRVTITCRASQSISSYLNWYQQKPGKAPKLLIYAASSLQSGVPSRFSGSGSGTDFTLTISSLQPEDFATYYCQQSAYLSTFGQGTKLEIKRLGDYKDHDGDYKDHDIDYKDDDDKAAAHHHHHH

SEQ ID NO: 252 - protein, 273 aa, Artificial Sequence
  PTPRT (2) scFv antibody
EVQLLESGGGLVQPGGSLRLSCAASGFTFSSSGMYWVRQAPGKGLEWVSGIYSYGSYTSYADSVKGRFTISRDNSKNTLYLQMNSLRAEDTAVYYCARVNYFGIDYWGQGTLVTVSSGGGGSGGGGSGGGGSDIQMTQSPSSLSASVGDRVTITCRASQSISSYLNWYQQKPGKAPKLLIYAASSLQSGVPSRFSGSGSGTDFTLTISSLQPEDFATYYCQQSWHSPPTFGQGTKLEIKRLGDYKDHDGDYKDHDIDYKDDDDKAAAHHHHHH

SEQ ID NO: 253 - protein, 277 aa, Artificial Sequence
  PGAM-5 (1) scFv antibody
EVQLLESGGGLVQPGGSLRLSCAASGFTFYSSYMYWVRQAPGKGLEWVSGISSYGGSTSYADSVKGRFTISRDNSKNTLYLQMNSLRAEDTAVYYCARYGPGSVFDYWGQGTLVTVSSGGGGSGGGGSGGGGSDIQMTQSPSSLSASVGDRVTITCRASQSISSYLNWYQQKPGKAPKLLIYAASSLQSGVPSRFSGSGSGTDFTLTISSLQPEDFATYYCQQVYVAYSYPYTFGQGTKLEIKRLGDYKDHDGDYKDHDIDYKDDDDKAAAHHHHHH

SEQ ID NO: 254 - protein, 274 aa, Artificial Sequence
  PGAM-5 (2) scFv antibody
EVQLLESGGGLVQPGGSLRLSCAASGFTFSGSYMYWVRQAPGKGLEWVSGISSSGDYTSYADSVKGRFTISRDNSKNTLYLQMNSLRAEDTAVYYCARVGYHSFFDYWGQGTLVTVSSGGGGSGGGGSGGGGSDIQMTQSPSSLSASVGDRVTITCRASQSISSYLNWYQQKPGKAPKLLIYAASSLQSGVPSRFSGSGSGTDFTLTISSLQPEDFATYYCQQYYWYLHTFGQGTKLEIKRLGDYKDHDGDYKDHDIDYKDDDDKAAAHHHHHH

SEQ ID NO: 255 - protein, 277 aa, Artificial Sequence
  PTPRJ (1) scFv antibody
EVQLLESGGGLVQPGGSLRLSCAASGFTFSSYAMSWVRQAPGKGLEWVSYISSSGGYTYYADSVKGRFTISRDNSKNTLYLQMNSLRAEDTAVYYCARWAPWPYGYSMDYWGQGTLVTVSSGGGGSGGGGSGGGGSDIQMTQSPSSLSASVGDRVTITCRASQSISSYLNWYQQKPGKAPKLLIYAASSLQSGVPSRFSGSGSGTDFTLTISSLQPEDFATYYCQQSSYSLSTFGQGTKLEIKRLGDYKDHDGDYKDHDIDYKDDDDKAAAHHHHHH

SEQ ID NO: 256 - protein, 274 aa, Artificial Sequence
  PTPRJ (7) scFv antibody
EVQLLESGGGLVQPGGSLRLSCAASGFTFSSGGMSWVRQAPGKGLEWVSSIYYSSSSTSYADSVKGRFTISRDNSKNTLYLQMNSLRAEDTAVYYCARGYGYYMDYWGQGTLVTVSSGGGGSGGGGSGGGGSDIQMTQSPSSLSASVGDRVTITCRASQSISSYLNWYQQKPGKAPKLLIYAASSLQSGVPSRFSGSGSGTDFTLTISSLQPEDFATYYCQQGSYAYLSTFGQGTKLEIKRLGDYKDHDGDYKDHDIDYKDDDDKAAAHHHHHH

SEQ ID NO: 257 - protein, 280 aa, Artificial Sequence
  PTPRJ (8) scFv antibody
EVQLLESGGGLVQPGGSLRLSCAASGFTFSSGGMYWVRQAPGKGLEWVSSIYGSSSSTYYADSVKGRFTISRDNSKNTLYLQMNSLRAEDTAVYYCARGPYASGYYYLDYWGQGTLVTVSSGGGGSGGGGSGGGGSDIQMTQSPSSLSASVGDRVTITCRASQSISSYLNWYQQKPGKAPKLLIYAASSLQSGVPSRFSGSGSGTDFTLTISSLQPEDFATYYCQQVNYSSSYPFTFGQGTKLEIKRLGDYKDHDGDYKDHDIDYKDDDDKAAAHHHHHH

SEQ ID NO: 258 - protein, 270 aa, Artificial Sequence
  ANM5 (1) scFv antibody
  VARIANT 249: Any amino acid
  VARIANT 262: Any amino acid
EVQLLESGGGLVQPGGSLRLSCAASGFTFSSYAMSWVRQAPGKGLEWVSGISGGSYYTGYADSVKGRFTISRDNSKNTLYLQMNSLRAEDTAVYYCARYTSAYYHAYFDYWGQGTLVTVSSGGGGSGGGGSGGGGSDIQMTQSPSSLSASVGDRVTITCRASQSISSYLNWYQQKPGKAPKLLIYAASSLQSGVPSRFSGSGSGTDFTLTISSLQPEDFATYYCQQSYSTPYTFGQGTKLEIKRLGDYXDHDGDYKDHDIDXKDDDDKAA

SEQ ID NO: 259 - protein, 266 aa, Artificial Sequence
  ANM5 (2) scFv antibody
EVQLLESGGGLVQPGGSLRLSCAASGFTFSYSSMGWVRQAPGKGLEWVSSIGGYSGYTYYADSVKGRFTISRDNSKNTLYLQMNSLRAEDTAVYYCARGSWYLDYWGQGTLVTVSSGGGGSGGGGSGGGGSDIQMTQSPSSLSASVGDRVTITCRASQSISSYLNWYQQKPGKAPKLLIYAASSLQSGVPSRFSGSGSGTDFTLTISSLQPEDFATYYCQQYGGYPPHTFGQGTKLEIKRLGDYKDHDGDYKDHDIDYKDDDDKAA

SEQ ID NO: 260 - protein, 265 aa, Artificial Sequence
  APLF (1) scFv antibody
  VARIANT 233: Any amino acid
  VARIANT 251: Any amino acid
  VARIANT 257..258: Any amino acid
  VARIANT 262..263: Any amino acid
EVQLLESGGGLVQPGGSLRLSCAASGFTFSSYAMSWVRQAPGKGLEWVSAISGSGGSTYYADSVKGRFTISRDNSKNTLYLQMNSLRAEDTAVYYCARGYYDLDYWGQGTLVTVSSGGGGSGGGGSGGGGSDIQMTQSPSSLSASVGDRVTITCRASQSISSYLNWYQQKPGKAPKLLIYAASSLQSGVPSRFSGSGSGTDFTLTISSLQPEDFATYYCQQSYSTPYTFGQGXKLEIKRLGDYKDHDGDYXDHDIDXXDDDXXAA

SEQ ID NO: 261 - protein, 265 aa, Artificial Sequence
  APLF (2) scFv antibody
  VARIANT 233: Any amino acid
  VARIANT 242: Any amino acid
  VARIANT 258: Any amino acid
EVQLLESGGGLVQPGGSLRLSCAASGFTFSSYAMSWVRQAPGKGLEWVSAISGSGGSTYYADSVKGRFTISRDNSKNTLYLQMNSLRAEDTAVYYCARGYYDMDYWGQGTLVTVSSGGGGSGGGGSGGGGSDIQMTQSPSSLSASVGDRVTITCRASQSISSYLNWYQQKPGKAPKLLIYAASSLQSGVPSRFSGSGSGTDFTLTISSLQPEDFATYYCQQSYSTPYTFGQGXKLEIKRLGXYKDHDGDYKDHDIDYXDDDDKAA

SEQ ID NO: 262 - protein, 271 aa, Artificial Sequence
  ARHGC-1 (1) scFv antibody
  VARIANT 247: Any amino acid
  VARIANT 264: Any amino acid
  VARIANT 266: Any amino acid
EVQLLESGGGLVQPGGSLRLSCAASGFTFGSYSMSWVRQAPGKGLEWVSSISYGGSYTSYADSVKGRFTISRDNSKNTLYLQMNSLRAEDTAVYYCARVYGGYYYGYIDYWGQGTLVTVSSGGGGSGGGGSGGGGSDIQMTQSPSSLSASVGDRVTITCRASQSISSYLNWYQQKPGKAPKLLIYAASSLQSGVPSRFSGSGSGTDFTLTISSLQPEDFATYYCQQWYADFPYTFGQGTKLEIKRLXDYKDHDGDYKDHDIDYXDXDDKAA

SEQ ID NO: 263 - protein, 267 aa, Artificial Sequence
  BIRC2 (1) scFv antibody
  VARIANT 253: Any amino acid
  VARIANT 259: Any amino acid
  VARIANT 263..264: Any amino acid
EVQLLESGGGLVQPGGSLRLSCAASGFTFYSSSMSWVRQAPGKGLEWVSSISSYSGYTSYADSVKGRFTISRDNSKNTLYLQMNSLRAEDTAVYYCARDYWGSLDYWGQGTLVTVSSGGGGSGGGGSGGGGSDIQMTQSPSSLSASVGDRVTITCRASQSISSYLNWYQQKPGKAPKLLIYAASSLQSGVPSRFSGSGSGTDFTLTISSLQPEDFATYYCQQHGYSYPLTFGQGTKLEIKRLGDYKDHDGDYXDHDIDXKDDXXKAA

SEQ ID NO: 264 - protein, 266 aa, Artificial Sequence
  BIRC2 (2) scFv antibody
  VARIANT 259: Any amino acid
EVQLLESGGGLVQPGGSLRLSCAASGFTFGGYGMGWVRQAPGKGLEWVSSISSYSSYTYYADSVKGRFTISRDNSKNTLYLQMNSLRAEDTAVYYCARTYYDYFDYWGQGTLVTVSSGGGGSGGGGSGGGGSDIQMTQSPSSLSASVGDRVTITCRASQSISSYLNWYQQKPGKAPKLLIYAASSLQSGVPSRFSGSGSGTDFTLTISSLQPEDFATYYCQQGYYYPYTFGQGTKLEIKRLGDYKDHDGDYKDHDIDYXDDDDKAA

SEQ ID NO: 265 - protein, 330 aa, Artificial Sequence
  DCNL1 (1) scFv antibody
  VARIANT 246: Any amino acid
  VARIANT 263: Any amino acid
  VARIANT 265: Any amino acid
  VARIANT 268: Any amino acid
  VARIANT 270: Any amino acid
  VARIANT 281..282: Any amino acid
  VARIANT 284: Any amino acid
  VARIANT 287..288: Any amino acid
  VARIANT 295..297: Any amino acid
  VARIANT 300: Any amino acid
  VARIANT 302..305: Any amino acid
  VARIANT 308..318: Any amino acid
  VARIANT 323..330: Any amino acid
EVQLLESGGGLVQPGGSLRLSCAASGFTFPYYYMSWVRQAPGKGLEWVSSIGSYSGGTSYADSVKGRFTISRDNSKNTLYLQMNSLRAEDTAVYYCARVYRVYFYSGFDYWGQGTLVTVSSGGGGSGGGGSGGGGSDIQMTQSPSSLSASVGDRVTITCRASQSISSYLNWYQQKPGKAPKLLIYAASSLQSGVPSRFSGSGSGTDFTLTISSLQPEDFATYYCQQSYSTPYTFGQGTKLEIKRLXDYKDHDGDYKDHDIDYXDXDDXAXAHHHHHHSPRXXSXSPXXESYYARXXXVVXQXXXXENXXXXXXXXXXXHPPFXXXXXXXX

SEQ ID NO: 266 - protein, 270 aa, Artificial Sequence
  DCNL1 (2) scFv antibody
  VARIANT 238: Any amino acid
  VARIANT 245: Any amino acid
  VARIANT 247: Any amino acid
  VARIANT 255: Any amino acid
  VARIANT 260: Any amino acid
  VARIANT 262..263: Any amino acid
  VARIANT 265: Any amino acid
  VARIANT 267..268: Any amino acid
EVQLLESGGGLVQPGGSLRLSCAASGFTFYYSYMSWVRQAPGKGLEWVSYISPGSGYTYYADSVKGRFTISRDNSKNTLYLQMNSLRAEDTAVYYCARFYWGYSSYLDYWGQGTLVTVSSGGGGSGGGGSGGGGSDIQMTQSPSSLSASVGDRVTITCRASQSISSYLNWYQQKPGKAPKLLIYAASSLQSGVPSRFSGSGSGTDFTLTISSLQPEDFATYYCQQVYYRGLPTFGQGXKLEIKRXGXYKDHDGDXKDHDXDXXMXMXXRP

SEQ ID NO: 267 - protein, 273 aa, Artificial Sequence
  DLG1-1 (1) scFv antibody
  VARIANT 220: Any amino acid
  VARIANT 249: Any amino acid
  VARIANT 259: Any amino acid
  VARIANT 263: Any amino acid
  VARIANT 265..266: Any amino acid
  VARIANT 270: Any amino acid
EVQLLESGGGLVQPGGSLRLSCAASGFTFSSYYMYWVRQAPGKGLEWVSGISSSGGSTYYADSVKGRFTISRDNSKNTLYLQMNSLRAEDTAVYYCARNRDYSSYDGGYMDYWGQGTLVTVSSGGGGSGGGGSGGGGSDIQMTQSPSSLSASVGDRVTITCRASQSISSYLNWYQQKPGKAPKLLIYAASSLQSGVPSRFSGSGSGTDFTLTISSLQPEXFATYYCQQGYSYYPLTFGQGTKLEIKRLXDYKDHDGDYXDHDXDXXMTMXRRP

SEQ ID NO: 268 - protein, 269 aa, Artificial Sequence
  DLG1-1 (2) scFv antibody
  VARIANT 245..246: Any amino acid
  VARIANT 261..265: Any amino acid
  VARIANT 267: Any amino acid
EVQLLESGGGLVQPGGSLRLSCAASGFTFSSYSMYWVRQAPGKGLEWVSSISYGGYYTYYADSVKGRFTISRDNSKNTLYLQMNSLRAEDTAVYYCARNGAFGYPYLDYWGQGTLVTVSSGGGGSGGGGSGGGGSDIQMTQSPSSLSASVGDRVTITCRASQSISSYLNWYQQKPGKAPKLLIYAASSLQSGVPSRFSGSGSGTDFTLTISSLQPEDFATYYCQQSYSTPYTFGQGTKLEIKRLXXYKDHDGDYKDHDIDXXXXXDXAA

SEQ ID NO: 269 - protein, 263 aa, Artificial Sequence
  DLG2-1 (1) scFv antibody
  VARIANT 210: Any amino acid
  VARIANT 224: Any amino acid
  VARIANT 228: Any amino acid
  VARIANT 234: Any amino acid
  VARIANT 237: Any amino acid
  VARIANT 242: Any amino acid
  VARIANT 245..246: Any amino acid
  VARIANT 248: Any amino acid
  VARIANT 251..252: Any amino acid
  VARIANT 258..262: Any amino acid
EVQLLESGGGLVQPGGSLRLSCAASGFTFSSYSMYWVRQAPGKGLEWVSGISSYSYYTSYADSVKGRFTISRDNSKNTLYLQMNSLRAEDTAVYYCARAFHGTPSIDYWGQGTLVTVSSGGGGSGGGGSGGGGSDIQMTQSPSSLSASVGDRVTITCRASQSISSYLNWYQQKPGKAPKLLIYAASSLQSGVPSRFSGSGSGTDFTLTIXSLQPEDFATYYCQXSNFXGLPTFXQGXKLEIXRLXXRXRLXXSHRLQXXXXXG

SEQ ID NO: 270 - protein, 308 aa, Artificial Sequence
  DLG2-1 (2) scFv antibody
  VARIANT 240: Any amino acid
  VARIANT 243: Any amino acid
  VARIANT 248: Any amino acid
  VARIANT 264: Any amino acid
  VARIANT 267..270: Any amino acid
  VARIANT 273..275: Any amino acid
  VARIANT 278: Any amino acid
  VARIANT 282..289: Any amino acid
  VARIANT 291: Any amino acid
  VARIANT 300..302: Any amino acid
  VARIANT 304: Any amino acid
  VARIANT 307..308: Any amino acid
EVQLLESGGGLVQPGGSLRLSCAASGFTFSGYSMSWVRQAPGKGLEWVSYISYSGYDTYYADSVKGRFTISRDNSKNTLYLQMNSLRAEDTAVYYCARSYYSYGYWHIDYWGQGTLVTVSSGGGGSGGGGSGGGGSDIQMTQSPSSLSASVGDRVTITCRASQSISSYLNWYQQKPGKAPKLLIYAASSLQSGVPSRFSGSGSGTDFTLTISSLQPEDFATYYCQQNSYSGPFTFGQGTXLEXKRLGXYKDHDGDYKDHDIDYXDDXXXXAAXXXHHXSPRXXXXXXXXEXYYARSLAVXXXRXDWXX

SEQ ID NO: 271 - protein, 264 aa, Artificial Sequence
  DPOLM (1) scFv antibody
  VARIANT 232: Any amino acid
  VARIANT 240..241: Any amino acid
  VARIANT 250: Any amino acid
  VARIANT 255..257: Any amino acid
  VARIANT 262: Any amino acid
EVQLLESGGGLVQPGGSLRLSCAASGFTFGSYSMYWVRQAPGKGLEWVSSISYGGGYTSYADSVKGRFTISRDNSKNTLYLQMNSLRAEDTAVYYCARGYYYMDYWGQGTLVTVSSGGGGSGGGGSGGGGSDIQMTQSPSSLSASVGDRVTITCRASQSISSYLNWYQQKPGKAPKLLIYAASSLQSGVPSRFSGSGSGTDFTLTISSLQPEDFATYYCQQSWSPFTFGQGXKLEIKRLXXYKDHDGDYXDHDIXXXDDDDXAA

SEQ ID NO: 272 - protein, 267 aa, Artificial Sequence
  DPOLM (2) scFv antibody
  VARIANT 259..261: Any amino acid
EVQLLESGGGLVQPGGSLRLSCAASGFTFGYYSMGWVRQAPGKGLEWVSGISYYSGYTSYADSVKGRFTISRDNSKNTLYLQMNSLRAEDTAVYYCARVGTWFTAFDYWGQGTLVTVSSGGGGSGGGGSGGGGSDIQMTQSPSSLSASVGDRVTITCRASQSISSYLNWYQQKPGKAPKLLIYAASSLQSGVPSRFSGSGSGTDFTLTISSLQPEDFATYYCQQYYVPFTFGQGTKLEIKRLGDYKDHDGDYKDHDIDXXXDDDKAA

SEQ ID NO: 273 - protein, 279 aa, Artificial Sequence
  DLG4-2 (1) scFv antibody
  VARIANT 197: Any amino acid
  VARIANT 202: Any amino acid
  VARIANT 210..211: Any amino acid
  VARIANT 216: Any amino acid
  VARIANT 236..238: Any amino acid
  VARIANT 243..245: Any amino acid
  VARIANT 249: Any amino acid
  VARIANT 251..252: Any amino acid
  VARIANT 255..261: Any amino acid
  VARIANT 263..279: Any amino acid
EVQLLESGGGLVQPGGSLRLSCAASGFTFGSYYMSWVRQAPGKGLEWVSGISGSYGYTYYADSVKGRFTISRDNSKNTLYLQMNSLRAEDTAVYYCARVSSGSAAFDYWGQGTLVTVSSGGGGSGGGGSGGGGSDIQMTQSPSSLSASVGDRVTITCRASQSISSYLNWYQQKPGKAPKLLIYAASSLQSGVPSRFXGSGSXTDFTLTIXXLQPEXFATYYCQQYFSLLTFGQGTXXXDQTPXXXRPRXLXXSHXXXXXXXGXXXXXXXXXXXXXXXXX

SEQ ID NO: 274 - protein, 268 aa, Artificial Sequence
  DLG4-2 (2) scFv antibody
  VARIANT 259..260: Any amino acid
  VARIANT 263..265: Any amino acid
EVQLLESGGGLVQPGGSLRLSCAASGFTFYSSYMYWVRQAPGKGLEWVSGISSSSGSTYYADSVKGRFTISRDNSKNTLYLQMNSLRAEDTAVYYCARYGYYSWGFDYWGQGTLVTVSSGGGGSGGGGSGGGGSDIQMTQSPSSLSASVGDRVTITCRASQSISSYLNWYQQKPGKAPKLLIYAASSLQSGVPSRFSGSGSGTDFTLTISSLQPEDFATYYCQQGAGFPPTFGQGTKLEIKRLGDYKDHDGDYKDHDIXXRMXXXRRP

SEQ ID NO: 275 - protein, 261 aa, Artificial Sequence
  GORS2-1 (1) scFv antibody
  VARIANT 240: Any amino acid
  VARIANT 245..247: Any amino acid
  VARIANT 252..253: Any amino acid
  VARIANT 255..257: Any amino acid
EVQLLESGGGLVQPGGSLRLSCAASGFTFSSYYMGWVRQAPGKGLEWVSSIYGYGGGTYYADSVKGRFTISRDNSKNTLYLQMNSLRAEDTAVYYCARGGSYFDYWGQGTLVTVSSGGGGSGGGGSGGGGSDIQMTQSPSSLSASVGDRVTITCRASQSISSYLNWYQQKPGKAPKLLIYAASSLQSGVPSRFSGSGSGTDFTLTISSLQPEDFATYYCQQVYGPLTFGQGTKLEIKRLXLRPRXXXIMTSXXRXXXTRRP

SEQ ID NO: 276 - protein, 266 aa, Artificial Sequence
  GORS2-1 (2) scFv antibody
  VARIANT 259: Any amino acid
EVQLLESGGGLVQPGGSLRLSCAASGFTFSYYSMGWVRQAPGKGLEWVSSISYSGYYTYYADSVKGRFTISRDNSKNTLYLQMNSLRAEDTAVYYCARSGHHVSFDYWGQGTLVTVSSGGGGSGGGGSGGGGSDIQMTQSPSSLSASVGDRVTITCRASQSISSYLNWYQQKPGKAPKLLIYAASSLQSGVPSRFSGSGSGTDFTLTISSLQPEDFATYYCQQGFYPFTFGQGTKLEIKRLGDYKDHDGDYKDHDIDYXDDDDKAA

SEQ ID NO: 277 - protein, 270 aa, Artificial Sequence
  INADL-1 (1) scFv antibody
  VARIANT 218: Any amino acid
  VARIANT 235: Any amino acid
  VARIANT 238: Any amino acid
  VARIANT 246..247: Any amino acid
  VARIANT 252: Any amino acid
  VARIANT 256: Any amino acid
  VARIANT 262: Any amino acid
  VARIANT 265: Any amino acid
EVQLLESGGGLVQPGGSLRLSCAASGFTFSSYAMSWVRQAPGKGLEWVSAISGSGGSTYYADSVKGRFTISRDNSKNTLYLQMNSLRAEDTAVYYCARDYVSAYGGYFDYWGQGTLVTVSSGGGGSGGGGSGGGGSDIQMTQSPSSLSASVGDRVTITCRASQSISSYLNWYQQKPGKAPKLLIYAASSLQSGVPSRFSGSGSGTDFTLTISSLQPEXFATYYCQQGYGSLHTFXQGXKLEIKRLXXYKDHXGDYXDHDIDXKDXDDKAA

SEQ ID NO: 278 - protein, 268 aa, Artificial Sequence
  INADL-1 (2) scFv antibody
  VARIANT 186: Any amino acid
  VARIANT 209: Any amino acid
  VARIANT 217..218: Any amino acid
  VARIANT 229: Any amino acid
  VARIANT 234..237: Any amino acid
  VARIANT 243: Any amino acid
  VARIANT 245..246: Any amino acid
  VARIANT 250: Any amino acid
  VARIANT 254..258: Any amino acid
  VARIANT 261..266: Any amino acid
  VARIANT 268: Any amino acid
EVQLLESGGGLVQPGGSLRLSCAASGFTFSSYAMSWVRQAPGKGLEWVSAISGSGGSTYYADSVKGRFTISRDNSKNTLYLQMNSLRAEDTAVYYCARWTSGGYLDYWGQGTLVTVSSGGGGSGGGGSGGGGSDIQMTQSPSSLSASVGDRVTITCRASQSISSYLNWYQQKPGKAPKLLIYAASXLQSGVPSRFSGSGSGTDFTLTIXSLQPEDFXXYYCQQGWSLLXFGQGXXXXRSNAVXIXXMTVXIKIXXXXXRMXXXXXXPX

SEQ ID NO: 279 - protein, 266 aa, Artificial Sequence
  KCC2B-3 (2) scFv antibody
  VARIANT 214: Any amino acid
  VARIANT 234: Any amino acid
  VARIANT 243: Any amino acid
  VARIANT 252: Any amino acid
  VARIANT 258..259: Any amino acid
  VARIANT 261..264: Any amino acid
EVQLLESGGGLVQPGGSLRLSCAASGFTFSSYAMSWVRQAPGKGLEWVSAISGSGGSTYYADSVKGRFTISRDNSKNTLYLQMNSLRAEDTAVYYCARDFSYGFDYWGQGTLVTVSSGGGGSGGGGSGGGGSDIQMTQSPSSLSASVGDRVTITCRASQSISSYLNWYQQKPGKAPKLLIYAASSLQSGVPSRFSGSGSGTDFTLTISSLQPEXFATYYCQQGSDDPYTFGQGXKLEIKRLGXYKDHDGDYXDHDIDXXDXXXXAA

SEQ ID NO: 280 - protein, 266 aa, Artificial Sequence
  KCC2B-3 (1) scFv antibody
  VARIANT 215: Any amino acid
  VARIANT 222: Any amino acid
  VARIANT 236..237: Any amino acid
  VARIANT 241..244: Any amino acid
  VARIANT 251: Any amino acid
  VARIANT 253: Any amino acid
  VARIANT 256: Any amino acid
  VARIANT 258..259: Any amino acid
  VARIANT 261..264: Any amino acid
EVQLLESGGGLVQPGGSLRLSCAASGFTFYSSYMYWVRQAPGKGLEWVSSIGGSSYSTYYADSVKGRFTISRDNSKNTLYLQMNSLRAEDTAVYYCARFHDYWALDYWGQGTLVTVSSGGGGSGGGGSGGGGSDIQMTQSPSSLSASVGDRVTITCRASQSISSYLNWYQQKPGKAPKLLIYAASSLQSGVPSRFSGSGSGTDFTLTISSLQPEXFATYYCXQSTVWYLPTFGQGXXLEIXXXXDYKDHDXLXSHXLXXMXXXXRP

SEQ ID NO: 281 - protein, 287 aa, Artificial Sequence
  ITCH-2 (1) scFv antibody
  VARIANT 200: Any amino acid
  VARIANT 233..234: Any amino acid
  VARIANT 236..238: Any amino acid
  VARIANT 240: Any amino acid
  VARIANT 244..246: Any amino acid
  VARIANT 248: Any amino acid
  VARIANT 250..252: Any amino acid
  VARIANT 254: Any amino acid
  VARIANT 257: Any amino acid
  VARIANT 259..262: Any amino acid
  VARIANT 265..268: Any amino acid
  VARIANT 271..275: Any amino acid
  VARIANT 278..282: Any amino acid
  VARIANT 284..287: Any amino acid
EVQLLESGGGLVQPGGSLRLSCAASGFTFYYSYMYWVRQAPGKGLEWVSGIGGYGGSTSYADSVKGRFTISRDNSKNTLYLQMNSLRAEDTAVYYCARVVGAGDFDYWGQGTLVTVSSGGGGSGGGGSGGGGSDIQMTQSPSSLSASVGDRVTITCRASQSISSYLNWYQQKPGKAPKLLIYAASSLQSGVPSRFSGSGXGTDFTLTISSLQPEDFATYYCQQYFFYYLHTFXXGXXXWXSNAXXXKXMXXXYXDHXIXXXXDDXXXXRPXXXXXLIXXXXXPXXXX

SEQ ID NO: 282 - protein, 284 aa, Artificial Sequence
  ITCH-2 (2) scFv antibody
  VARIANT 203: Any amino acid
  VARIANT 209: Any amino acid
  VARIANT 233: Any amino acid
  VARIANT 235: Any amino acid
  VARIANT 240: Any amino acid
  VARIANT 244: Any amino acid
  VARIANT 253..255: Any amino acid
  VARIANT 260: Any amino acid
  VARIANT 262..267: Any amino acid
  VARIANT 269: Any amino acid
  VARIANT 273..274: Any amino acid
  VARIANT 276..280: Any amino acid
  VARIANT 282..283: Any amino acid
EVQLLESGGGLVQPGGSLRLSCAASGFTFYSYGMYWVRQAPGKGLEWVSYIPGYGYSTSYADSVKGRFTISRDNSKNTLYLQMNSLRAEDTAVYYCARSFGYGDFDYWGQGTLVTVSSGGGGSGGGGSGGGGSDIQMTQSPSSLSASVGDRVTITCRASQSISSYLNWYQQKPGKAPKLLIYAASSLQSGVPSRFSGSGSGTXFTLTIXSLQPEDFATYYCQQYDYSPYTFGXGXKLEIXRLGXYKDHDGDYXXXDIDYXGXXXXXXPXSSSXXIXXXXXSXXP

SEQ ID NO: 283 - protein, 269 aa, Artificial Sequence
  KCC4 (1) scFv antibody
  VARIANT 248: Any amino acid
  VARIANT 255: Any amino acid
  VARIANT 260..262: Any amino acid
  VARIANT 264..266: Any amino acid
EVQLLESGGGLVQPGGSLRLSCAASGFTFGGGYMGWVRQAPGKGLEWVSYISGSGSYTYYADSVKGRFTISRDNSKNTLYLQMNSLRAEDTAVYYCARYSSVSSYSYFDYWGQGTLVTVSSGGGGSGGGGSGGGGSDIQMTQSPSSLSASVGDRVTITCRASQSISSYLNWYQQKPGKAPKLLIYAASSLQSGVPSRFSGSGSGTDFTLTISSLQPEDFATYYCQQSVHLPTFGQGTKLEIKRLGDYXDHDGDYXDHDIXXXDXXXKAA

SEQ ID NO: 284 - protein, 293 aa, Artificial Sequence
  KCC4 (2) scFv antibody
  VARIANT 215: Any amino acid
  VARIANT 234: Any amino acid
  VARIANT 237: Any amino acid
  VARIANT 243: Any amino acid
  VARIANT 249: Any amino acid
  VARIANT 252..254: Any amino acid
  VARIANT 256: Any amino acid
  VARIANT 259: Any amino acid
  VARIANT 263..264: Any amino acid
  VARIANT 266..269: Any amino acid
  VARIANT 272..274: Any amino acid
  VARIANT 279: Any amino acid
  VARIANT 281..282: Any amino acid
  VARIANT 284: Any amino acid
  VARIANT 286: Any amino acid
  VARIANT 288..290: Any amino acid
  VARIANT 292..293: Any amino acid
EVQLLESGGGLVQPGGSLRLSCAASGFTFPYSYMYWVRQAPGKGLEWVSAISGSGGSTYYADSVKGRFTISRDNSKNTLYLQMNSLRAEDTAVYYCARYASYSAIDYWGQGTLVTVSSGGGGSGGGGSGGGGSDIQMTQSPSSLSASVGDRVTITCRASQSISSYLNWYQQKPGKAPKLLIYAASSLQSGVPSRFSGSGSGTDFTLTISSLQPEXFATYYCQQTGGLYTFGQGXKLXIKRLGXYKDHDXDYXXXDXDYXDDDXXAXXXXHHXXXSPRWXSXXPXSXSXXXRXX

SEQ ID NO: 285 - protein, 325 aa, Artificial Sequence
  KKCC1-1 (1) scFv antibody
  VARIANT 237: Any amino acid
  VARIANT 248: Any amino acid
  VARIANT 259: Any amino acid
  VARIANT 261: Any amino acid
  VARIANT 266..269: Any amino acid
  VARIANT 273: Any amino acid
  VARIANT 276: Any amino acid
  VARIANT 280..282: Any amino acid
  VARIANT 284..285: Any amino acid
  VARIANT 288: Any amino acid
  VARIANT 292: Any amino acid
  VARIANT 295..296: Any amino acid
  VARIANT 298: Any amino acid
  VARIANT 301: Any amino acid
  VARIANT 303: Any amino acid
  VARIANT 305: Any amino acid
  VARIANT 308..318: Any amino acid
  VARIANT 321..325: Any amino acid
EVQLLESGGGLVQPGGSLRLSCAASGFTFYYSYMYWVRQAPGKGLEWVSAISGSGGSTYYADSVKGRFTISRDNSKNTLYLQMNSLRAEDTAVYYCARSYTPASYRFDYWGQGTLVTVSSGGGGSGGGGSGGGGSDIQMTQSPSSLSASVGDRVTITCRASQSISSYLNWYQQKPGKAPKLLIYAASSLQSGVPSRFSGSGSGTDFTLTISSLQPEDFATYYCQQSYSTPYTFGQGXKLEIKRLGDYXDHDGDYKDHDXDXKDDDXXXXRPSXSSXLITXXXLXXALXVVLXALXXPXFYXVXTXKTXXXXXXXXXXXHPXXXXX

SEQ ID NO: 286 - protein, 269 aa, Artificial Sequence
  KKCC1-1 (2) scFv antibody
  VARIANT 237: Any amino acid
  VARIANT 245..246: Any amino acid
  VARIANT 248: Any amino acid
  VARIANT 253: Any amino acid
  VARIANT 255: Any amino acid
  VARIANT 262: Any amino acid
  VARIANT 264..267: Any amino acid
EVQLLESGGGLVQPGGSLRLSCAASGFTFGGSGMGWVRQAPGKGLEWVSSIGYGYSSTYYADSVKGRFTISRDNSKNTLYLQMNSLRAEDTAVYYCARYSYHYYPDFDYWGQGTLVTVSSGGGGSGGGGSGGGGSDIQMTQSPSSLSASVGDRVTITCRASQSISSYLNWYQQKPGKAPKLLIYAASSLQSGVPSRFSGSGSGTDFTLTISSLQPEDFATYYCQQVFRYPLTFGQGXKLEIKRLXXYXDHDGXYXDHDIDYXDXXXXAA

SEQ ID NO: 287 - protein, 268 aa, Artificial Sequence
  LIN7A (1) scFv antibody
  VARIANT 245: Any amino acid
  VARIANT 261: Any amino acid
  VARIANT 266: Any amino acid
EVQLLESGGGLVQPGGSLRLSCAASGFTFSGYSMSWVRQAPGKGLEWVSSISSGSYSTSYADSVKGRFTISRDNSKNTLYLQMNSLRAEDTAVYYCARGYSYFDRSFDYWGQGTLVTVSSGGGGSGGGGSGGGGSDIQMTQSPSSLSASVGDRVTITCRASQSISSYLNWYQQKPGKAPKLLIYAASSLQSGVPSRFSGSGSGTDFTLTISSLQPEDFATYYCQQNPGPFTFGQGTKLEIKRLGXYKDHDGDYKDHDIDYXDDDDXAA

SEQ ID NO: 288 - protein, 266 aa, Artificial Sequence
  LIN7A (2) scFv antibody
  VARIANT 214: Any amino acid
  VARIANT 224: Any amino acid
  VARIANT 234: Any amino acid
  VARIANT 258: Any amino acid
  VARIANT 264: Any amino acid
EVQLLESGGGLVQPGGSLRLSCAASGFTFYSYGMSWVRQAPGKGLEWVSSISSSYSYTYYADSVKGRFTISRDNSKNTLYLQMNSLRAEDTAVYYCARGYYGGFDYWGQGTLVTVSSGGGGSGGGGSGGGGSDIQMTQSPSSLSASVGDRVTITCRASQSISSYLNWYQQKPGKAPKLLIYAASSLQSGVPSRFSGSGSGTDFTLTISSLQPEXFATYYCQQSXYTPFTFGQGXKLEIKRLGDYKDHDGDYKDHDIDXKDDDDXAA

SEQ ID NO: 289 - protein, 268 aa, Artificial Sequence
  SNTA1 (1) scFv antibody
  VARIANT 236: Any amino acid
  VARIANT 245: Any amino acid
  VARIANT 252: Any amino acid
  VARIANT 258..261: Any amino acid
  VARIANT 263: Any amino acid
  VARIANT 266: Any amino acid
EVQLLESGGGLVQPGGSLRLSCAASGFTFSSYSMSWVRQAPGKGLEWVSGIYGGGSSTYYADSVKGRFTISRDNSKNTLYLQMNSLRAEDTAVYYCARPSSSGSYVMDYWGQGTLVTVSSGGGGSGGGGSGGGGSDIQMTQSPSSLSASVGDRVTITCRASQSISSYLNWYQQKPGKAPKLLIYAASSLQSGVPSRFSGSGSGTDFTLTISSLQPEDFATYYCQQSYSPHTFGQGXKLEIKRLGXYKDHDGXYKDHDXXXXDXDDXAA

SEQ ID NO: 290 - protein, 267 aa, Artificial Sequence
  SNTA1 (2) scFv antibody
  VARIANT 244: Any amino acid
  VARIANT 259..260: Any amino acid
  VARIANT 265: Any amino acid
EVQLLESGGGLVQPGGSLRLSCAASGFTFSSYAMSWVRQAPGKGLEWVSAISGSGGSTYYADSVKGRFTISRDNSKNTLYLQMNSLRAEDTAVYYCARYPVYYYFDYWGQGTLVTVSSGGGGSGGGGSGGGGSDIQMTQSPSSLSASVGDRVTITCRASQSISSYLNWYQQKPGKAPKLLIYAASSLQSGVPSRFSGSGSGTDFTLTISSLQPEDFATYYCQQSYVPLSTFGQGTKLEIKRLGXYKDHDGDYKDHDIDXXDDDDXAA

SEQ ID NO: 291 - protein, 266 aa, Artificial Sequence
  MAGI1-1 (1) scFv antibody
  VARIANT 234: Any amino acid
  VARIANT 243: Any amino acid
  VARIANT 259..260: Any amino acid
  VARIANT 264: Any amino acid
EVQLLESGGGLVQPGGSLRLSCAASGFTFSYSSMSWVRQAPGKGLEWVSGISGSGYSTYYADSVKGRFTISRDNSKNTLYLQMNSLRAEDTAVYYCARGYSGFDYWGQGTLVTVSSGGGGSGGGGSGGGGSDIQMTQSPSSLSASVGDRVTITCRASQSISSYLNWYQQKPGKAPKLLIYAASSLQSGVPSRFSGSGSGTDFTLTISSLQPEDFATYYCQQYGYATLPTFGQGXKLEIKRLGXYKDHDGDYKDHDIDYXXDDDXAA

SEQ ID NO: 292 - protein, 329 aa, Artificial Sequence
  MAGI1-1 (2) scFv antibody
  VARIANT 235: Any amino acid
  VARIANT 246: Any amino acid
  VARIANT 252: Any amino acid
  VARIANT 254: Any amino acid
  VARIANT 262..263: Any amino acid
  VARIANT 267..268: Any amino acid
  VARIANT 270: Any amino acid
  VARIANT 273: Any amino acid
  VARIANT 275: Any amino acid
  VARIANT 277..278: Any amino acid
  VARIANT 282..283: Any amino acid
  VARIANT 285..286: Any amino acid
  VARIANT 288: Any amino acid
  VARIANT 292..294: Any amino acid
  VARIANT 296..297: Any amino acid
  VARIANT 301..304: Any amino acid
  VARIANT 310..312: Any amino acid
  VARIANT 314: Any amino acid
  VARIANT 317..320: Any amino acid
  VARIANT 322..329: Any amino acid
EVQLLESGGGLVQPGGSLRLSCAASGFTFSSYAMSWVRQAPGKGLEWVSGISGSYGYTSYADSVKGRFTISRDNSKNTLYLQMNSLRAEDTAVYYCARGYYSYYDGPIDYWGQGTLVTVSSGGGGSGGGGSGGGGSDIQMTQSPSSLSASVGDRVTITCRASQSISSYLNWYQQKPGKAPKLLIYAASSLQSGVPSRFSGSGSGTDFTLTISSLQPEDFATYYCQQSYSTPYTFXQGTKLEIKRLXDYKDHXGXYKDHDIDXXDDDXXAXAHXHXHXXSPRXXSXXPXSESXXXRXXAVVXXXXDWENPXXXNXIAXXXXPXXXXXXXX

SEQ ID NO: 293 - protein, 333 aa, Artificial Sequence
  MARK1-1 (1) scFv antibody
  VARIANT 238..240: Any amino acid
  VARIANT 248: Any amino acid
  VARIANT 255: Any amino acid
  VARIANT 266: Any amino acid
  VARIANT 268: Any amino acid
  VARIANT 272..273: Any amino acid
  VARIANT 279: Any amino acid
  VARIANT 281..284: Any amino acid
  VARIANT 286: Any amino acid
  VARIANT 292..293: Any amino acid
  VARIANT 295: Any amino acid
  VARIANT 297: Any amino acid
  VARIANT 299..300: Any amino acid
  VARIANT 303: Any amino acid
  VARIANT 305..307: Any amino acid
  VARIANT 311: Any amino acid
  VARIANT 314..316: Any amino acid
  VARIANT 318..321: Any amino acid
  VARIANT 325..326: Any amino acid
  VARIANT 328..333: Any amino acid
EVQLLESGGGLVQPGGSLRLSCAASGFTFSGYGMGWVRQAPGKGLEWVSSISYYGGGTGYADSVKGRFTISRDNSKNTLYLQMNSLRAEDTAVYYCARFDDFYASHYGIYIDYWGQGTLVTVSSGGGGSGGGGSGGGGSDIQMTQSPSSLSASVGDRVTITCRASQSISSYLNWYQQKPGKAPKLLIYAASSLQSGVPSRFSGSGSGTDFTLTISSLQPEDFATYYCQQASSLFTFGXXXKLEIKRLXDYKDHDXDYKDHDIDYKXDXDKAXXHHHHHXSXXXXSXSPYSEXXYXRXLXXRFXTXXXGKPXVTXXXRXXXXPPFXXWXXXXXX

SEQ ID NO: 294 - protein, 333 aa, Artificial Sequence
  MARK1-1 (2) scFv antibody
  VARIANT 232: Any amino acid
  VARIANT 259..260: Any amino acid
  VARIANT 268: Any amino acid
  VARIANT 278..279: Any amino acid
  VARIANT 281..282: Any amino acid
  VARIANT 288: Any amino acid
  VARIANT 292: Any amino acid
  VARIANT 298: Any amino acid
  VARIANT 300: Any amino acid
  VARIANT 305..306: Any amino acid
  VARIANT 308..310: Any amino acid
  VARIANT 313..315: Any amino acid
  VARIANT 319..320: Any amino acid
  VARIANT 323..324: Any amino acid
  VARIANT 326..333: Any amino acid
EVQLLESGGGLVQPGGSLRLSCAASGFTFSSYAMSWVRQAPGKGLEWVSAISGSGGSTYYADSVKGRFTISRDNSKNTLYLQMNSLRAEDTAVYYCARYSYGSYFDYWGQGTLVTVSSGGGGSGGGGSGGGGSDIQMTQSPSSLSASVGDRVTITCRASQSISSYLNWYQQKPGKAPKLLIYAASSLQSGVPSRFSGSGSGTDFTLTISSLQPEDFATYYCQQYHGWPPTFXQGTKLEIKRLGDYKDHDGDYKDHDIDXXDDDDKAAXHHHHHHSPRXXSXXPYSESXYARXLAVVLXVXTGKTXXYXXXSPXXXSPFXXLAXXRXXXXXXXX

SEQ ID NO: 295 - protein, 263 aa, Artificial Sequence
  OTU6B (1) scFv antibody
  VARIANT 231: Any amino acid
  VARIANT 254..256: Any amino acid
  VARIANT 258: Any amino acid
  VARIANT 261: Any amino acid
EVQLLESGGGLVQPGGSLRLSCAASGFTFYSSSMYWVRQAPGKGLEWVSGISSYGSYTSYADSVKGRFTISRDNSKNTLYLQMNSLRAEDTAVYYCARGPFFDYWGQGTLVTVSSGGGGSGGGGSGGGGSDIQMTQSPSSLSASVGDRVTITCRASQSISSYLNWYQQKPGKAPKLLIYAASSLQSGVPSRFSGSGSGTDFTLTISSLQPEDFATYYCQQFPNPHTFGQGXRLEIKRLGDYKDHDGDYKDHDIXXXDXDDXAA

SEQ ID NO: 296 - protein, 267 aa, Artificial Sequence
  OTU6B (2) scFv antibody
  VARIANT 235: Any amino acid
  VARIANT 259..260: Any amino acid
  VARIANT 263: Any amino acid
  VARIANT 265: Any amino acid
EVQLLESGGGLVQPGGSLRLSCAASGFTFSSSGMSWVRQAPGKGLEWVSSISGSYGYTSYADSVKGRFTISRDNSKNTLYLQMNSLRAEDTAVYYCARSYSYVYGFDYWGQGTLVTVSSGGGGSGGGGSGGGGSDIQMTQSPSSLSASVGDRVTITCRASQSISSYLNWYQQKPGKAPKLLIYAASSLQSGVPSRFSGSGSGTDFTLTISSLQPEDFATYYCQQNVHLYTFGQGXKLEIKRLGDYKDHDGDYKDHDIDXXDDXDXAA

SEQ ID NO: 297 - protein, 262 aa, Artificial Sequence
  NOS1-1 (1) scFv antibody
  VARIANT 202..203: Any amino acid
  VARIANT 215: Any amino acid
  VARIANT 233: Any amino acid
  VARIANT 241: Any amino acid
  VARIANT 244..245: Any amino acid
  VARIANT 247: Any amino acid
  VARIANT 251: Any amino acid
  VARIANT 253..255: Any amino acid
  VARIANT 259: Any amino acid
  VARIANT 261: Any amino acid
EVQLLESGGGLVQPGGSLRLSCAASGFTFGSYYMYWVRQAPGKGLEWVSGISSYSGYTYYADSVKGRFTISRDNSKNTLYLQMNSLRAEDTAVYYCARSADSGGFDYWGQGTLVTVSSGGGGSGGGGSGGGGSDIQMTQSPSSLSASVGDRVTITCRASQSISSYLNWYQQKPGKAPKLLIYAASSLQSGVPSRFSGSGSGXXFTLTISSLQPEXFATYYCQQSYFYGLPTFXQGTKLEIXRLXXYXDHDXDXXXHDIXYXD

SEQ ID NO: 298 - protein, 273 aa, Artificial Sequence
  NOS1-1 (2) scFv antibody
  VARIANT 221: Any amino acid
  VARIANT 241: Any amino acid
  VARIANT 250: Any amino acid
  VARIANT 256..257: Any amino acid
  VARIANT 265..268: Any amino acid
EVQLLESGGGLVQPGGSLRLSCAASGFTFSSYAMSWVRQAPGKGLEWVSAISGSGGSTYYADSVKGRFTISRDNSKNTLYLQMNSLRAEDTAVYYCARPGYYGAAYYRSFIDYWGQGTLVTVSSGGGGSGGGGSGGGGSDIQMTQSPSSLSASVGDRVTITCRASQSISSYLNWYQQKPGKAPKLLIYAASSLQSGVPSRFSGSGSGTDFTLTISSLQPEXFATYYCQQSYSTPYTFGQGXKLEIKRLGXYKDHDXXYKDHDIDXXXXDDKAA

SEQ ID NO: 299 - protein, 279 aa, Artificial Sequence
  OTUB1-1 (1) scFv antibody
  VARIANT 234..235: Any amino acid
  VARIANT 237..238: Any amino acid
  VARIANT 240: Any amino acid
  VARIANT 244..246: Any amino acid
  VARIANT 249: Any amino acid
  VARIANT 251..252: Any amino acid
  VARIANT 259..263: Any amino acid
  VARIANT 265..267: Any amino acid
  VARIANT 269..271: Any amino acid
  VARIANT 274: Any amino acid
  VARIANT 276: Any amino acid
  VARIANT 278..279: Any amino acid
EVQLLESGGGLVQPGGSLRLSCAASGFTFYSSSMSWVRQAPGKGLEWVSGISSSGYSTGYADSVKGRFTISRDNSKNTLYLQMNSLRAEDTAVYYCARYGGYHTYLDYWGQGTLVTVSSGGGGSGGGGSGGGGSDIQMTQSPSSLSASVGDRVTITCRASQSISSYLNWYQQKPGKAPKLLIYAASSLQSGVPSRFSGSGSGTDFTLTISSLQPEDFATYYCQQYSYTSLFTFXXGXXLXIKRXXXYKXHXXDYKDHDXXXXXDXXXAXXXHHXHXSXX

SEQ ID NO: 300 - protein, 278 aa, Artificial Sequence
  OTUB1-1 (2) scFv antibody
  VARIANT 215: Any amino acid
  VARIANT 222: Any amino acid
  VARIANT 235..237: Any amino acid
  VARIANT 244: Any amino acid
  VARIANT 246..247: Any amino acid
  VARIANT 249..251: Any amino acid
  VARIANT 254: Any amino acid
  VARIANT 256: Any amino acid
  VARIANT 259..260: Any amino acid
  VARIANT 262: Any amino acid
  VARIANT 264: Any amino acid
  VARIANT 266..267: Any amino acid
  VARIANT 270..271: Any amino acid
  VARIANT 273..278: Any amino acid
EVQLLESGGGLVQPGGSLRLSCAASGFTFSSYAMSWVRQAPGKGLEWVSAISGSGGSTYYADSVKGRFTISRDNSKNTLYLQMNSLRAEDTAVYYCARYHYYAGFDYWGQGTLVTVSSGGGGSGGGGSGGGGSDIQMTQSPSSLSASVGDRVTITCRASQSISSYLNWYQQKPGKAPKLLIYAASSLQSGVPSRFSGSGSGTDFTLTISSLQPEXFATYYCXQSGSFLPTFGQGXXXEIKRLGXYXXHXXXYKXHXIDXXMXMXRXXPIXXIXXXXXX

SEQ ID NO: 301 - protein, 323 aa, Artificial Sequence
  OTUB2-1 (1) scFv antibody
  VARIANT 224: Any amino acid
  VARIANT 235: Any amino acid
  VARIANT 238..240: Any amino acid
  VARIANT 243: Any amino acid
  VARIANT 250: Any amino acid
  VARIANT 257: Any amino acid
  VARIANT 259..260: Any amino acid
  VARIANT 263..266: Any amino acid
  VARIANT 270: Any amino acid
  VARIANT 274..275: Any amino acid
  VARIANT 279: Any amino acid
  VARIANT 281..282: Any amino acid
  VARIANT 285: Any amino acid
  VARIANT 287..288: Any amino acid
  VARIANT 290: Any amino acid
  VARIANT 294..296: Any amino acid
  VARIANT 298..301: Any amino acid
  VARIANT 306..307: Any amino acid
  VARIANT 309..316: Any amino acid
  VARIANT 320..323: Any amino acid
EVQLLESGGGLVQPGGSLRLSCAASGFTFGGYSMSWVRQAPGKGLEWVSGIYSYSYSTSYADSVKGRFTISRDNSKNTLYLQMNSLRAEDTAVYYCARHPNWSYFDYWGQGTLVTVSSGGGGSGGGGSGGGGSDIQMTQSPSSLSASVGDRVTITCRASQSISSYLNWYQQKPGKAPKLLIYAASSLQSGVPSRFSGSGSGTDFTLTISSLQPEDFATYYCQQXYSTPYTFGQGXKLXXXRLXDYKDHDXDYKDHDXDXXDDXXXXAAHXHHHXXPRWXSXXPYXEXXYXRSLXXXFXXXXLGKPXXYXXXXXXXXSPFXXXX

SEQ ID NO: 302 - protein, 249 aa, Artificial Sequence
  OTUB2-1 (2) scFv antibody
  VARIANT 144: Any amino acid
  VARIANT 159..160: Any amino acid
  VARIANT 169..170: Any amino acid
  VARIANT 185: Any amino acid
  VARIANT 195..196: Any amino acid
  VARIANT 202: Any amino acid
  VARIANT 208..209: Any amino acid
  VARIANT 211: Any amino acid
  VARIANT 213..214: Any amino acid
  VARIANT 222: Any amino acid
  VARIANT 225: Any amino acid
  VARIANT 228: Any amino acid
  VARIANT 231..242: Any amino acid
  VARIANT 245..249: Any amino acid
EVQLLESGGGLVQPGGSLRLSCAASGFTFYGSYMYWVRQAPGKGLEWVSYISGSSGSTSYADSVKGRFTISRDNSKNTLYLQMNSLRAEDTAVYYCARYGHASFDYWGQGTLVTVSSGGGGSGGGGSGGGGSDIQMTQSPSSLXASVGDRVTITCRASXXISSYLNWYXXKPGKAPKLLIYAASXLQSGVPSRFXXSGSGTXFTLTIXXLXPXXFATYYCQXGSXLPXFGXXXXXXXXXXXXYKXXXXX

SEQ ID NO: 303 - protein, 268 aa, Artificial Sequence
  PAK4-1 (1) scFv antibody
  VARIANT 235..236: Any amino acid
  VARIANT 241: Any amino acid
  VARIANT 260..261: Any amino acid
  VARIANT 265: Any amino acid
EVQLLESGGGLVQPGGSLRLSCAASGFTFSSYSMYWVRQAPGKGLEWVSSISGSGSYTYYADSVKGRFTISRDNSKNTLYLQMNSLRAEDTAVYYCARYYHRSHRFPLDYWGQGTLVTVSSGGGGSGGGGSGGGGSDIQMTQSPSSLSASVGDRVTITCRASQSISSYLNWYQQKPGKAPKLLIYAASSLQSGVPSRFSGSGSGTDFTLTISSLQPEDFATYYCQQSSYPFTFGXXPSWRXNAVIIKTMTVIIKIMTSIXXMTMXRRP

SEQ ID NO: 304 - protein, 264 aa, Artificial Sequence
  PAK4-1 (2) scFv antibody
  VARIANT 232: Any amino acid
  VARIANT 241: Any amino acid
  VARIANT 254: Any amino acid
  VARIANT 256..257: Any amino acid
  VARIANT 261..262: Any amino acid
EVQLLESGGGLVQPGGSLRLSCAASGFTFGYYSMSWVRQAPGKGLEWVSSIYSYSSGTYADSVKGRFTISRDNSKNTLYLQMNSLRAEDTAVYYCARGSSVIDYWGQGTLVTVSSGGGGSGGGGSGGGGSDIQMTQSPSSLSASVGDRVTITCRASQSISSYLNWYQQKPGKAPKLLIYAASSLQSGVPSRFSGSGSGTDFTLTISSLQPEDFATYYCQQSYSTPYTFGQGXKLEIKRLGXYKDHDGDYKDHDXDXXDDDXXAA

SEQ ID NO: 305 - protein, 272 aa, Artificial Sequence
  PRDM8-1 (1) scFv antibody
  VARIANT 221: Any amino acid
  VARIANT 240: Any amino acid
  VARIANT 251: Any amino acid
  VARIANT 263..265: Any amino acid
  VARIANT 268..270: Any amino acid
EVQLLESGGGLVQPGGSLRLSCAASGFTFSGYGMSWVRQAPGKGLEWVSSIGGSYYSTGYADSVKGRFTISRDNSKNTLYLQMNSLRAEDTAVYYCARSYSVHYPYYHDHFDYWGQGTLVTVSSGGGGSGGGGSGGGGSDIQMTQSPSSLSASVGDRVTITCRASQSISSYLNWYQQKPGKAPKLLIYAASSLQSGVPSRFSGSGSGTDFTLTISSLQPEXFATYYCQQYFYPYTFGQGXKLEIKRLGDYXDHDGDYKDHDIXXXDDXXXAA

SEQ ID NO: 306 - protein, 246 aa, Artificial Sequence
  PRDM8-1 (2) scFv antibody
  VARIANT 168: Any amino acid
  VARIANT 176: Any amino acid
  VARIANT 179: Any amino acid
  VARIANT 191: Any amino acid
  VARIANT 201..203: Any amino acid
  VARIANT 205..208: Any amino acid
  VARIANT 214..215: Any amino acid
  VARIANT 217: Any amino acid
  VARIANT 220: Any amino acid
  VARIANT 222..224: Any amino acid
  VARIANT 227..229: Any amino acid
  VARIANT 232..233: Any amino acid
  VARIANT 236: Any amino acid
  VARIANT 238..240: Any amino acid
  VARIANT 242..244: Any amino acid
  VARIANT 246: Any amino acid
EVQLLESGGGLVQPGGSLRLSCAASGFTFSYSSMYWVRQAPGKGLEWVSYISGYGGYTSYADSVKGRFTISRDNSKNTLYLQMNSLRAEDTAVYYCARDVGYYFWSGHSMDYWGQGTLVTVSSGGGGSGGGGSGGGGSDIQMTQSPSSLSASVGDRVTITCRASQSIXSYLNWYQXKPXKAPKLLIYAASXLQSGVPSRFXXXGXXXXFTLTIXXLXPEXFXXXYCXXXSSXXTFXQXXXLXXXRX

SEQ ID NO: 307 - protein, 311 aa, Artificial Sequence
  PTN13-1 (1) scFv antibody
  VARIANT 245: Any amino acid
  VARIANT 248: Any amino acid
  VARIANT 250: Any amino acid
  VARIANT 258: Any amino acid
  VARIANT 260..267: Any amino acid
  VARIANT 270..271: Any amino acid
  VARIANT 279..283: Any amino acid
  VARIANT 287..291: Any amino acid
  VARIANT 293..297: Any amino acid
  VARIANT 299: Any amino acid
  VARIANT 301..304: Any amino acid
  VARIANT 307..311: Any amino acid
EVQLLESGGGLVQPGGSLRLSCAASGFTFSSYAMSWVRQAPGKGLEWVSGISGYSSYTYYADSVKGRFTISRDNSKNTLYLQMNSLRAEDTAVYYCARVYYPGHSMDYWGQGTLVTVSSGGGGSGGGGSGGGGSDIQMTQSPSSLSASVGDRVTITCRASQSISSYLNWYQQKPGKAPKLLIYAASSLQSGVPSRFSGSGSGTDFTLTISSLQPEDFATYYCQQSVHYPHTFGQGTKLEIKRLGXYKXHXGDYKDHDXDXXXXXXXXAAXXHHHHSPRXXXXXPYSXXXXXRXXXXXFXTXXXXKPXXXXX

SEQ ID NO: 308 - protein, 270 aa, Artificial Sequence
  PTN13-1 (2) scFv antibody
  VARIANT 218: Any amino acid
  VARIANT 235: Any amino acid
  VARIANT 238: Any amino acid
  VARIANT 241: Any amino acid
  VARIANT 246..247: Any amino acid
  VARIANT 251: Any amino acid
  VARIANT 254: Any amino acid
  VARIANT 256..257: Any amino acid
  VARIANT 264: Any amino acid
  VARIANT 266..269: Any amino acid
EVQLLESGGGLVQPGGSLRLSCAASGFTFGSYYMSWVRQAPGKGLEWVSGIGSYSSYTGYADSVKGRFTISRDNSKNTLYLQMNSLRAEDTAVYYCARGHSYYYSPPFDYWGQGTLVTVSSGGGGSGGGGSGGGGSDIQMTQSPSSLSASVGDRVTITCRASQSISSYLNWYQQKPGKAPKLLIYAASSLQSGVPSRFSGSGSGTDFTLTISSLQPEXFATYYCQQDGYSPFTFXQGXKLXIKRLXXYKDXDGXYXXHDIDYKXDXXXXA

SEQ ID NO: 309 - protein, 266 aa, Artificial Sequence
  CHEK2 (1) scFv antibody
  VARIANT 243: Any amino acid
  VARIANT 259: Any amino acid
  VARIANT 263: Any amino acid
EVQLLESGGGLVQPGGSLRLSCAASGFTFGSYSMSWVRQAPGKGLEWVSGISGSYSSTYYADSVKGRFTISRDNSKNTLYLQMNSLRAEDTAVYYCARGDSWVFDYWGQGTLVTVSSGGGGSGGGGSGGGGSDIQMTQSPSSLSASVGDRVTITCRASQSISSYLNWYQQKPGKAPKLLIYAASSLQSGVPSRFSGSGSGTDFTLTISSLQPEDFATYYCQQSYSYPFTFGQGTKLEIKRLGXYKDHDGDYKDHDIDYXDDDXKAA

SEQ ID NO: 310 - protein, 271 aa, Artificial Sequence
  CHEK2 (2) scFv antibody
  VARIANT 200: Any amino acid
  VARIANT 239: Any amino acid
  VARIANT 243: Any amino acid
  VARIANT 248: Any amino acid
  VARIANT 250: Any amino acid
  VARIANT 255..256: Any amino acid
  VARIANT 262..264: Any amino acid
  VARIANT 267..269: Any amino acid
EVQLLESGGGLVQPGGSLRLSCAASGFTFYYSGMSWVRQAPGKGLEWVSGIGYSGYYTSYADSVKGRFTISRDNSKNTLYLQMNSLRAEDTAVYYCARSSYYGTSGYVFDYWGQGTLVTVSSGGGGSGGGGSGGGGSDIQMTQSPSSLSASVGDRVTITCRASQSISSYLNWYQQKPGKAPKLLIYAASSLQSGVPSRFXGSGSGTDFTLTISSLQPEDFATYYCQQADVYPLTFGQGXKLEXKRLGXYXDHDGXXKDHDIXXXDDXXXRP

SEQ ID NO: 311 - protein, 271 aa, Artificial Sequence
  CSNK1E (1) scFv antibody
  VARIANT 239: Any amino acid
  VARIANT 255: Any amino acid
  VARIANT 264: Any amino acid
  VARIANT 267: Any amino acid
  VARIANT 269: Any amino acid
EVQLLESGGGLVQPGGSLRLSCAASGFTFGSYSMSWVRQAPGKGLEWVSSISGGYSYTSYADSVKGRFTISRDNSKNTLYLQMNSLRAEDTAVYYCARSFSYYYGVFLDYWGQGTLVTVSSGGGGSGGGGSGGGGSDIQMTQSPSSLSASVGDRVTITCRASQSISSYLNWYQQKPGKAPKLLIYAASSLQSGVPSRFSGSGSGTDFTLTISSLQPEDFATYYCQQGYSSYPLTFGQGXKLEIKRLGDYKDHDGXYKDHDIDYXDDXDXAA

SEQ ID NO: 312 - protein, 319 aa, Artificial Sequence
  CSNK1E (2) scFv antibody
  VARIANT 212: Any amino acid
  VARIANT 231: Any amino acid
  VARIANT 240: Any amino acid
  VARIANT 249: Any amino acid
  VARIANT 254: Any amino acid
  VARIANT 256: Any amino acid
  VARIANT 259..260: Any amino acid
  VARIANT 264: Any amino acid
  VARIANT 275..277: Any amino acid
  VARIANT 282: Any amino acid
  VARIANT 284: Any amino acid
  VARIANT 286: Any amino acid
  VARIANT 291: Any amino acid
  VARIANT 294: Any amino acid
  VARIANT 296..297: Any amino acid
  VARIANT 299: Any amino acid
  VARIANT 302..306: Any amino acid
  VARIANT 308..310: Any amino acid
  VARIANT 313..319: Any amino acid
EVQLLESGGGLVQPGGSLRLSCAASGFTFSSYAMSWVRQAPGKGLEWVSGIYSSYGGTYYADSVKGRFTISRDNSKNTLYLQMNSLRAEDTAVYYCARGVYMDYWGQGTLVTVSSGGGGSGGGGSGGGGSDIQMTQSPSSLSASVGDRVTITCRASQSISSYLNWYQQKPGKAPKLLIYAASSLQSGVPSRFSGSGSGTDFTLTISSLQPEXFATYYCQQVIFPFTFGQGXKLEIKRLGXYKDHDGDYXDHDIXYXDDXXKAAXHHHHHHSPRWXXXSPYSXSXYXRSLAXVLXRXXWXNPXXXXXIXXXHIXXXXXXX

SEQ ID NO: 313 - protein, 264 aa, Artificial Sequence
  DUSP7 (1) scFv antibody
  VARIANT 231..233: Any amino acid
  VARIANT 241: Any amino acid
  VARIANT 244: Any amino acid
  VARIANT 251..252: Any amino acid
  VARIANT 255: Any amino acid
  VARIANT 257..258: Any amino acid
  VARIANT 261..263: Any amino acid
EVQLLESGGGLVQPGGSLRLSCAASGFTFSSYAMSWVRQAPGKGLEWVSAISGSGGSTYYADSVKGRFTISRDNSKNTLYLQMNSLRAEDTAVYYCARGGRGIDYWGQGTLVTVSSGGGGSGGGGSGGGGSDIQMTQSPSSLSASVGDRVTITCRASQSISSYLNWYQQKPGKAPKLLIYAASSLQSGVPSRFSGSGSGTDFTLTISSLQPEDFATYYCQQSYSTPYTFGXXXKLEIKRLXDYXDHDGDYXXHDXDXXMTXXXG

SEQ ID NO: 314 - protein, 248 aa, Artificial Sequence
  DUSP7 (2) scFv antibody
  VARIANT 99..104: Any amino acid
  VARIANT 230: Any amino acid
  VARIANT 233: Any amino acid
  VARIANT 236..238: Any amino acid
  VARIANT 240: Any amino acid
  VARIANT 242: Any amino acid
  VARIANT 244..248: Any amino acid
EVQLLESGGGLVQPGGSLRLSCAASGFTFSSYAMSWVRQAPGKGLEWVSAISGSGGSTYYADSVKGRFTISRDNSKNTLYLQMNSLRAEDTAVYYCARXXXXXXYWGQGTLVTVSSGGGGSGGGGSGGGGSDIQMTQSPSSLSASVGDRVTITCRASQSISSYLNWYQQKPGKAPKLLIYAASSLQSGVPSRFSGSGSGTDFTLTISSLQPEDFATYYCQQSYSTPYTFXQGXKLXXXRXGXYXXXXX

SEQ ID NO: 315 - protein, 331 aa, Artificial Sequence
  FER (1) scFv antibody
  VARIANT 242: Any amino acid
  VARIANT 251: Any amino acid
  VARIANT 258: Any amino acid
  VARIANT 266..267: Any amino acid
  VARIANT 272: Any amino acid
  VARIANT 274: Any amino acid
  VARIANT 276: Any amino acid
  VARIANT 286: Any amino acid
  VARIANT 288: Any amino acid
  VARIANT 295: Any amino acid
  VARIANT 297: Any amino acid
  VARIANT 299: Any amino acid
  VARIANT 301..307: Any amino acid
  VARIANT 311..316: Any amino acid
  VARIANT 318: Any amino acid
  VARIANT 320..323: Any amino acid
  VARIANT 325: Any amino acid
  VARIANT 327..331: Any amino acid
EVQLLESGGGLVQPGGSLRLSCAASGFTFGYSYMHWVRQAPGKGLEWVSYISSYGGYTGYADSVKGRFTISRDNSKNTLYLQMNSLRAEDTAVYYCARSSVDSVVWYGGYIDYWGQGTLVTVSSGGGGSGGGGSGGGGSDIQMTQSPSSLSASVGDRVTITCRASQSISSYLNWYQQKPGKAPKLLIYAASSLQSGVPSRFSGSGSGTDFTLTISSLQPEDFATYYCQQSGFNSPHTFGQGXKLEIKRLGXYKDHDGXYKDHDIDXXDDDDXAXAXHHHHHSPRWXSXSPYSESXYXRXLXXXXXXXDWEXXXXXXLXRXXXXPXFXXXXX

SEQ ID NO: 316 - protein, 271 aa, Artificial Sequence
  FER (2) scFv antibody
  VARIANT 236: Any amino acid
  VARIANT 239: Any amino acid
  VARIANT 248: Any amino acid
  VARIANT 254: Any amino acid
  VARIANT 257: Any amino acid
  VARIANT 261..264: Any amino acid
  VARIANT 266: Any amino acid
  VARIANT 268..269: Any amino acid
EVQLLESGGGLVQPGGSLRLSCAASGFTFGGYYMYWVRQAPGKGLEWVSGISYSGSYTYYADSVKGRFTISRDNSKNTLYLQMNSLRAEDTAVYYCARSYGPVYYSSSLDYWGQGTLVTVSSGGGGSGGGGSGGGGSDIQMTQSPSSLSASVGDRVTITCRASQSISSYLNWYQQKPGKAPKLLIYAASSLQSGVPSRFSGSGSGTDFTLTISSLQPEDFATYYCQQSYSTPYTFXQGXKLEIKRLGXYKDHDXDYXDHDXXXXDXDXXRP

SEQ ID NO: 317 - protein, 269 aa, Artificial Sequence
  GRK5 (1) scFv antibody
  VARIANT 237: Any amino acid
  VARIANT 246: Any amino acid
  VARIANT 262..263: Any amino acid
  VARIANT 265..266: Any amino acid
EVQLLESGGGLVQPGGSLRLSCAASGFTFYGYGMSWVRQAPGKGLEWVSSISGGGYGTYYADSVKGRFTISRDNSKNTLYLQMNSLRAEDTAVYYCARGYSYYSGYFDYWGQGTLVTVSSGGGGSGGGGSGGGGSDIQMTQSPSSLSASVGDRVTITCRASQSISSYLNWYQQKPGKAPKLLIYAASSLQSGVPSRFSGSGSGTDFTLTISSLQPEDFATYYCQQSVGYLSTFGQGXKLEIKRLGXYKDHDGDYKDHDIDYXXDXXKAA

SEQ ID NO: 318 - protein, 288 aa, Artificial Sequence
  PRKCZ (1) scFv antibody
  VARIANT 207..208: Any amino acid
  VARIANT 213: Any amino acid
  VARIANT 233: Any amino acid
  VARIANT 236: Any amino acid
  VARIANT 241..242: Any amino acid
  VARIANT 252: Any amino acid
  VARIANT 255: Any amino acid
  VARIANT 257..258: Any amino acid
  VARIANT 261..262: Any amino acid
  VARIANT 264: Any amino acid
  VARIANT 267..269: Any amino acid
  VARIANT 271: Any amino acid
  VARIANT 274..276: Any amino acid
  VARIANT 278..282: Any amino acid
  VARIANT 284: Any amino acid
  VARIANT 286..288: Any amino acid
EVQLLESGGGLVQPGGSLRLSCAASGFTFSSYAMSWVRQAPGKGLEWVSAISGSGGSTYYADSVKGRFTISRDNSKNTLYLQMNSLRAEDTAVYYCARGSHGLDYWGQGTLVTVSSGGGGSGGGGSGGGGSDIQMTQSPSSLSASVGDRVTITCRASQSISSYLNWYQQKPGKAPKLLIYAASSLQSGVPSRFSGSGSGTDFTLTIXXLQPEXFATYYCQQSYSTPYTFGQGXKLXIKRLXXYKDHDGDYKXHDXDXXMTXXRXPPXXXIXIDXXXWXXXXXYXEXXX

SEQ ID NO: 319 - protein, 279 aa, Artificial Sequence
  PRKCZ (2) scFv antibody
  VARIANT 213: Any amino acid
  VARIANT 231: Any amino acid
  VARIANT 238: Any amino acid
  VARIANT 242: Any amino acid
  VARIANT 245: Any amino acid
  VARIANT 250: Any amino acid
  VARIANT 256: Any amino acid
  VARIANT 258..259: Any amino acid
  VARIANT 261..264: Any amino acid
  VARIANT 272: Any amino acid
  VARIANT 275: Any amino acid
  VARIANT 277..279: Any amino acid
EVQLLESGGGLVQPGGSLRLSCAASGFTFSSYAMSWVRQAPGKGLEWVSAISGSGGSTYYADSVKGRFTISRDNSKNTLYLQMNSLRAEDTAVYYCARGGHGIDYWGQGTLVTVSSGGGGSGGGGSGGGGSDIQMTQSPSSLSASVGDRVTITCRASQSISSYLNWYQQKPGKAPKLLIYAASSLQSGVPSRFSGSGSGTDFTLTISSLQPEXFATYYCQQSYSTPYTFGXGTKLEIXRLGXYKXHDGDXKDHDIXYXXDXXXXPPIIIIIXDHXGXXX

SEQ ID NO: 320 - protein, 272 aa, Artificial Sequence
  PRKG2 (1) scFv antibody
  VARIANT 220: Any amino acid
  VARIANT 247: Any amino acid
  VARIANT 249: Any amino acid
  VARIANT 251: Any amino acid
  VARIANT 259: Any amino acid
  VARIANT 263..266: Any amino acid
  VARIANT 268..270: Any amino acid
EVQLLESGGGLVQPGGSLRLSCAASGFTFGYSGMSWVRQAPGKGLEWVSYIYGSSGYTYYADSVKGRFTISRDNSKNTLYLQMNSLRAEDTAVYYCARSGPSYYYPPVYLDYWGQGTLVTVSSGGGGSGGGGSGGGGSDIQMTQSPSSLSASVGDRVTITCRASQSISSYLNWYQQKPGKAPKLLIYAASSLQSGVPSRFSGSGSGTDFTLTISSLQPEXFATYYCQQSYSTPYTFGQGTKLEIKRXGXYXDHDGDYKXHDIXXXXDXXXAA

SEQ ID NO: 321 - protein, 271 aa, Artificial Sequence
  PRKG2 (2) scFv antibody
  VARIANT 220: Any amino acid
  VARIANT 239: Any amino acid
  VARIANT 248: Any amino acid
  VARIANT 257: Any amino acid
  VARIANT 264: Any amino acid
  VARIANT 266: Any amino acid
  VARIANT 268: Any amino acid
EVQLLESGGGLVQPGGSLRLSCAASGFTFSSSSMGWVRQAPGKGLEWVSYISGYSSSTYYADSVKGRFTISRDNSKNTLYLQMNSLRAEDTAVYYCARPTYGPGSARVYIDYWGQGTLVTVSSGGGGSGGGGSGGGGSDIQMTQSPSSLSASVGDRVTITCRASQSISSYLNWYQQKPGKAPKLLIYAASSLQSGVPSRFSGSGSGTDFTLTISSLQPEXFATYYCQQSGYPFTFGQGXKLEIKRLGXYKDHDGDYXDHDIDYXDXDXKAA

SEQ ID NO: 322 - protein, 335 aa, Artificial Sequence
  PTPRD (1) scFv antibody
  VARIANT 221: Any amino acid
  VARIANT 238: Any amino acid
  VARIANT 241: Any amino acid
  VARIANT 246: Any amino acid
  VARIANT 253: Any amino acid
  VARIANT 263: Any amino acid
  VARIANT 265..271: Any amino acid
  VARIANT 273: Any amino acid
  VARIANT 281: Any amino acid
  VARIANT 285..286: Any amino acid
  VARIANT 288: Any amino acid
  VARIANT 291: Any amino acid
  VARIANT 295: Any amino acid
  VARIANT 297: Any amino acid
  VARIANT 304..307: Any amino acid
  VARIANT 312..313: Any amino acid
  VARIANT 315..323: Any amino acid
  VARIANT 325..335: Any amino acid
EVQLLESGGGLVQPGGSLRLSCAASGFTFSSYAMSWVRQAPGKGLEWVSAISGSGGSTYYADSVKGRFTISRDNSKNTLYLQMNSLRAEDTAVYYCARYGFVTYPYGGGYLDYWGQGTLVTVSSGGGGSGGGGSGGGGSDIQMTQSPSSLSASVGDRVTITCRASQSISSYLNWYQQKPGKAPKLLIYAASSLQSGVPSRFSGSGSGTDFTLTISSLQPEXFATYYCQQSYSTPYTFXQGXKLEIXRLGDYKXHDGDYKDHDXDXXXXXXXAXAHHHHHHXSPRXXSXSPXSESXYXRSLAVVXXXXDWENXXVXXXXXXXXXPXXXXXXXXXXX

SEQ ID NO: 323 - protein, 334 aa, Artificial Sequence
  PTPRD (2) scFv antibody
  VARIANT 219: Any amino acid
  VARIANT 242: Any amino acid
  VARIANT 245..246: Any amino acid
  VARIANT 253: Any amino acid
  VARIANT 256..257: Any amino acid
  VARIANT 260..268: Any amino acid
  VARIANT 270..271: Any amino acid
  VARIANT 278: Any amino acid
  VARIANT 282: Any amino acid
  VARIANT 284: Any amino acid
  VARIANT 286..289: Any amino acid
  VARIANT 291..294: Any amino acid
  VARIANT 296..299: Any amino acid
  VARIANT 301..306: Any amino acid
  VARIANT 308: Any amino acid
  VARIANT 311: Any amino acid
  VARIANT 314..318: Any amino acid
  VARIANT 321..329: Any amino acid
  VARIANT 331..334: Any amino acid
EVQLLESGGGLVQPGGSLRLSCAASGFTFGYSDMYWVRQAPGKGLEWVSGIGYSGYYTSYADSVKGRFTISRDNSKNTLYLQMNSLRAEDTAVYYCARNASGVYSYAYFDYWGQGTLVTVSSGGGGSGGGGSGGGGSDIQMTQSPSSLSASVGDRVTITCRASQSISSYLNWYQQKPGKAPKLLIYAASSLQSGVPSRFSGSGSGTDFTLTISSLQPEXFATYYCQQYSYPFTFGQGTKLEXKRXXDYKDHDXDYXXHDXXXXXXXXXGXXSSSSSLXTAVXLXFXXXXVXXXXLXXXXFXXXXXXPXLPXLIXXXXXPFXXXXXXXXXAXXXX

SEQ ID NO: 324 - protein, 268 aa, Artificial Sequence
  PTPPRN2 (1) scFv antibody
  VARIANT 233: Any amino acid
  VARIANT 244: Any amino acid
  VARIANT 254: Any amino acid
  VARIANT 258: Any amino acid
  VARIANT 264..266: Any amino acid
EVQLLESGGGLVQPGGSLRLSCAASGFTFSSYAMSWVRQAPGKGLEWVSAISGSGGSTYYADSVKGRFTISRDNSKNTLYLQMNSLRAEDTAVYYCARGPASSAYFDYWGQGTLVTVSSGGGGSGGGGSGGGGSDIQMTQSPSSLSASVGDRVTITCRASQSISSYLNWYQQKPGKAPKLLIYAASSLQSGVPSRFSGSGSGTDFTLTISSLQPEDFATYYCQQSYSTPYTFXQGTKLEIKRLXDYKDHDGDYXDHDXDYKDDXXXAA

SEQ ID NO: 325 - protein, 268 aa, Artificial Sequence
  PTPPRN2 (2) scFv antibody
  VARIANT 236: Any amino acid
  VARIANT 252: Any amino acid
  VARIANT 263..266: Any amino acid
EVQLLESGGGLVQPGGSLRLSCAASGFTFSGYSMSWVRQAPGKGLEWVSSISGSYGSTYYADSVKGRFTISRDNSKNTLYLQMNSLRAEDTAVYYCARYGYPYFGMDYWGQGTLVTVSSGGGGSGGGGSGGGGSDIQMTQSPSSLSASVGDRVTITCRASQSISSYLNWYQQKPGKAPKLLIYAASSLQSGVPSRFSGSGSGTDFTLTISSLQPEDFATYYCQQSYSTPYTFGQGXKLEIKRLGDYKDHDGXYKDHDIDYKDXXDXAA

SEQ ID NO: 326 - protein, 263 aa, Artificial Sequence
  SHC1 (1) scFv antibody
  VARIANT 214: Any amino acid
  VARIANT 233: Any amino acid
  VARIANT 242: Any amino acid
  VARIANT 248: Any amino acid
  VARIANT 255..261: Any amino acid
EVQLLESGGGLVQPGGSLRLSCAASGFTFSSYAMSWVRQAPGKGLEWVSYISYYSGYTYYADSVKGRFTISRDNSKNTLYLQMNSLRAEDTAVYYCARHYYGGFDYWGQGTLVTVSSGGGGSGGGGSGGGGSDIQMTQSPSSLSASVGDRVTITCRASQSISSYLNWYQQKPGKAPKLLIYAASSLQSGVPSRFSGSGSGTDFTLTISSLQPEXFATYYCQQGYTLYTFGQGXKLEIKRLGXYKDHDXDYKDHDXXXXXXXAA

SEQ ID NO: 327 - protein, 265 aa, Artificial Sequence
  SHC1 (2) scFv antibody
  VARIANT 231: Any amino acid
  VARIANT 234: Any amino acid
  VARIANT 237: Any amino acid
  VARIANT 245: Any amino acid
  VARIANT 248: Any amino acid
  VARIANT 252: Any amino acid
  VARIANT 256..258: Any amino acid
  VARIANT 262: Any amino acid
EVQLLESGGGLVQPGGSLRLSCAASGFTFSSSYMSWVRQAPGKGLEWVSSIGGSGYSTYYADSVKGRFTISRDNSKNTLYLQMNSLRAEDTAVYYCARSYHYYIDYWGQGTLVTVSSGGGGSGGGGSGGGGSDIQMTQSPSSLSASVGDRVTITCRASQSISSYLNWYQQKPGKAPKLLIYAASSLQSGVPSRFSGSGSGTDFTLTISSLQPEDFATYYCQQPYFPPTFGXGTXLEXKRLGDYKXHDXDYKXHDIXXXMTMXRRP

SEQ ID NO: 328 - protein, 280 aa, Artificial Sequence
  STAP1 (1) scFv antibody
EVQLLESGGGLVQPGGSLRLSCAASGFTFSGYSMGWVRQAPGKGLEWVSGISSYYYGTSYADSVKGRFTISRDNSKNTLYLQMNSLRAEDTAVYYCARSWTVGSSWDGDAFDYWGQGTLVTVSSGGGGSGGGGSGGGGSDIQMTQSPSSLSASVGDRVTITCRASQSISSYLNWYQQKPGKAPKLLIYAASSLQSGVPSRFSGSGSGTDFTLTISSLQPEDFATYYCQQSYWYPLTFGQGTKLEIKRLGDYKDHDGDYKDHDIDYKDDDDKAAAHHHHHH

SEQ ID NO: 329 - protein, 265 aa, Artificial Sequence
  STAP2 (2) scFv antibody
  VARIANT 251: Any amino acid
  VARIANT 255: Any amino acid
  VARIANT 257..258: Any amino acid
  VARIANT 260..262: Any amino acid
EVQLLESGGGLVQPGGSLRLSCAASGFTFSSYAMSWVRQAPGKGLEWVSAISGSGGSTYYADSVKGRFTISRDNSKNTLYLQMNSLRAEDTAVYYCARGGGYFDYWGQGTLVTVSSGGGGSGGGGSGGGGSDIQMTQSPSSLSASVGDRVTITCRASQSISSYLNWYQQKPGKAPKLLIYAASSLQSGVPSRFSGSGSGTDFTLTISSLQPEDFATYYCQQSYSTPYTFGQGTKLEIKRLGDYKDHDGDYXDHDXDXXMXXXRRP

1. A method for diagnosing or determining a pancreatic cancer-associated disease state comprising or consisting of the steps of:
(a) providing a sample from an individual to be tested; and
(b) measuring the presence and/or amount in the test sample of one or more biomarkers selected from the group defined in Table A;
wherein the presence and/or amount in the test sample of the one or more biomarkers selected from the group defined in Table A is indicative of the pancreatic cancer-associated disease state in the individual.

2. The method according to claim 1 wherein the sample in step (a) is blood or serum.

3. The method according to claim 1 or 2 wherein the sample in step (a) is from a patient in one of the following risk groups:
(a) Individuals with a family history of pancreatic cancer;
(b) Individuals diagnosed with new-onset diabetes type II; or
(c) Individuals with symptoms suggestive or consistent with pancreatic cancer.

4. The method according to any one of the preceding claims wherein step (b) comprises or consists of measuring the presence and/or amount of one or more biomarker(s) listed in Table A, part (i) and/or part (iii).

5. The method according to any one of the preceding claims wherein the method is for:
(i) diagnosis and/or staging of early pancreatic cancer;
(ii) identifying individuals at risk of having or developing pancreatic cancer;
(iii) diagnosis and/or staging of pancreatic cancer;
(iv) differentiating between pancreatic cancer and chronic pancreatitis; and/or
(v) detecting the presence of intraductal papillary mucinous neoplasms.

6. The method according to any one of the preceding claims wherein the pancreatic cancer is pancreatic adenocarcinoma.

7. The method according to any one of the preceding claims wherein step (b) comprises or consists of measuring the presence and/or amount of one or more biomarker(s) listed in Table A, for example at least 2, 3, 4, 5, 6, 7, 8, 9, 10, 11, 12, 13, 14, 15, 16, 17, 18, 19, 20, 21, 22, 23, 24, 25, 26, 27, 28, or all 29 of the biomarkers listed in Table A.

8. The method according to any one of the preceding claims wherein step (b) comprises or consists of measuring the presence and/or amount of.
(i) the biomarkers listed in Table A and Complement C1q (C1q; e.g. Uniprot ID P02745, 2746 and/or 2747);
(ii) the biomarkers listed in Table A, excluding Interleukin-6 (IL-6) and/or GTP-binding protein GEM (GEM); or
(iii) the biomarkers listed in Table A (excluding IL-6 and GEM) and C1q.

9. The method according to any one of the preceding claims wherein step (b) comprises or consists of measuring the presence and/or amount of the following biomarkers:
DLG1, PRKCZ, VEGF, C3, C1INH, IL-4, IFNγ, C5, PTK6, CHP1, APLF, CAMK4, MAGI, MARK1, PRDM8, APOA1, CDK2, HADH2, C4, VSX2/CHX10, ICAM-1, IL-13, Lewis x/CD15, MYOM2, Factor P, Sialyl Lewis x, TNFβ and Complement C1q
(optionally including one or more biomarkers from Table B and/or IL-6 and/or GEM).

10. The method according to any one of the preceding claims wherein step (b) comprises or consists of measuring the presence and/or amount of one or more additional biomarker(s) listed in Table B, for example at least 2, 3, 4, 5, 6, 7, 8, 9, 10, 15, 20, 25, 30, 35, 40, 45, 50, 55, 60, 65, 70,75, 80, 85, 90 or all of the biomarkers in Table B.

11. The method according to any one of the preceding claims wherein the pancreatic cancer-associated disease state is early stage pancreatic cancer.

12. The method according to claim 11 wherein the method is for the diagnosis of stage I and/or stage II pancreatic cancer.

13. The method according to claim 12 wherein step (b) comprises or consists of measuring the presence and/or amount of one or more biomarker listed in:
(i) Table A, part (i), for example both of the biomarkers listed in Table A(i); and/or
(ii) Table A, part (ii), for example at least 2, 3, 4, 5, 6, 7 or all of the biomarkers listed in Table A(ii); and/or
(iii) Table A, part (iii), for example at least 2, 3, 4, 5, 6 or all of the biomarkers listed in Table A(iii); and/or
(iv) Table A, part (iv), for example at least 2, 3, 4, 5, 6, 7, 8, 9, 10, 11, 12 or all of the biomarkers listed in Table A(iv).

14. The method according to claim 12 or 13 wherein step (b) comprises or consists of measuring the presence and/or amount of one or more biomarker listed in Table C, for example at least 2, 3, 4, 5, 6, 7, 8, 9, 10, 11, 12, 13, 14, 15, 16, 17, 18, 19, 20, 21, 22, 23, 24 or all of the biomarkers in Table C.

15. The method according to any one of the preceding claims wherein the pancreatic cancer-associated disease state is late stage pancreatic cancer.

16. The method according to claim 15 wherein the method is for the diagnosis of stage III and/or stage IV pancreatic cancer.

17. The method according to claim 16 wherein step (b) comprises or consists of measuring the presence and/or amount of one or more biomarker listed in:
(i) Table A, part (i), for example both of the biomarkers listed in Table A(i); and/or
(ii) Table A, part (ii), for example at least 2, 3, 4, 5, 6, 7 or all of the biomarkers listed in Table A(ii); and/or
(iii) Table A, part (iii), for example at least 2, 3, 4, 5, 6 or all of the biomarkers listed in Table A(iii); and/or
(iv) Table A, part (iv), for example at least 2, 3, 4, 5, 6, 7, 8, 9, 10, 11, 12 or all of the biomarkers listed in Table A(iv).

18. The method according to claim 16 or 17 wherein step (b) comprises or consists of measuring the presence and/or amount of one or more biomarker listed in Table D, for example at least 2, 3, 4, 5, 6, 7, 8, 9, 10, 11, 12, 13, 14, 15, 16, 17, 18, 19, 20, 21, 22, 23 or all of the biomarkers in Table D.

19. The method according to any one of the preceding claims wherein the method is for differentiating pancreatic cancer from chronic pancreatitis.

20. The method according to claim 19 wherein step (b) comprises or consists of measuring the presence and/or amount of one or more biomarkers listed in:
(i) Table A, part (i), for example both of the biomarkers listed in Table A(i); and/or
(ii) Table A, part (ii), for example at least 2, 3, 4, 5, 6, 7 or all of the biomarkers listed in Table A(ii); and/or
(iii) Table A, part (iii), for example at least 2, 3, 4, 5, 6 or all of the biomarkers listed in Table A(iii); and/or
(iv) Table A, part (iv), for example at least 2, 3, 4, 5, 6, 7, 8, 9, 10, 11, 12 or all of the biomarkers listed in Table A(iv).

21. The method according to claim 19 or 20 wherein step (b) comprises or consists of measuring the presence and/or amount of one or more biomarkers selected from the group consisting of IL-4, C4, MAPK9, C1INH, VEGF, PTPRD, KCC4, TNF-α, C1q and BTK.

22. The method according to any one of the preceding claims wherein the method is for detecting the presence of intraductal papillary mucinous neoplasms, for example malignant IPMNs.

23. The method according to claim 22 wherein step (b) comprises or consists of measuring the presence and/or amount of one or more biomarkers listed in:
(i) Table A, part (i), for example both of the biomarkers listed in Table A(i); and/or
(ii) Table A, part (ii), for example at least 2, 3, 4, 5, 6, 7 or all of the biomarkers listed in Table A(ii); and/or
(iii) Table A, part (iii), for example at least 2, 3, 4, 5, 6 or all of the biomarkers listed in Table A(iii); and/or
(iv) Table A, part (iv), for example at least 2, 3, 4, 5, 6, 7, 8, 9, 10, 11, 12 or all of the biomarkers listed in Table A(iv).

24. The method according to any one of the preceding claims wherein step (b) comprises measuring the presence and/or amount of all of the biomarkers listed in Table A (e.g. at the protein, mRNA and/or ctDNA level).

25. The method according to any one of the preceding claims wherein step (b) comprises measuring the presence and/or amount of DLG1, PRKCZ, VEGF, C3, C1INH, IL-4, IFNγ, C5, PTK6, CHP1, APLF, CAMK4, MAGI, MARK1, PRDM8, APOA1, CDK2, HADH2, C4, VSX2/CHX10, ICAM-1, IL-13, Lewis x/CD15, MYOM2, Factor P, Sialyl Lewis x, TNFβ and Complement C1q.

26. The method according to any one of the preceding claims further comprising or consisting of the steps of:
(c) providing one or more control samples from:
i. an individual not afflicted with pancreatic cancer; and/or
ii. an individual afflicted with pancreatic cancer, wherein the sample was of a different stage to that of the test sample; and/or
iii. an individual afflicted with chronic pancreatitis; and
(d) determining a biomarker signature of the one or more control samples by measuring the presence and/or amount in the control sample of the one or more biomarkers measured in step (b);
wherein the pancreatic cancer-associated disease state is identified in the event that the presence and/or amount in the test sample of the one or more biomarkers measured in step (b) is different from the presence and/or amount in the control sample of the one or more biomarkers measured in step (d).

27. The method according to any one of the preceding claims further comprising or consisting of the steps of:
(e) providing one or more control samples from;
i. an individual afflicted with pancreatic cancer; and/or
ii. an individual afflicted with pancreatic cancer, wherein the sample was of the same stage to that of that the test sample;
(f) determining a biomarker signature of the control sample by measuring the presence and/or amount in the control sample of the one or more biomarkers measured in step (b);
wherein the pancreatic cancer-associated disease state is identified in the event that the presence and/or amount in the test sample of the one or more biomarkers measured in step (b) corresponds to the presence and/or amount in the control sample of the one or more biomarkers measured in step (f).

28. The method according to claim 26 wherein the individual not afflicted with pancreatic cancer is a healthy individual.

29. The method according to claim 26 or 27 wherein the one or more individual afflicted with pancreatic cancer is afflicted with a pancreatic cancer selected from the group consisting of adenocarcinoma (e.g., pancreatic ductal adenocarcinoma or tubular papillary pancreatic adenocarcinoma), pancreatic sarcoma, malignant serous cystadenoma, adenosquamous carcinoma, signet ring cell carcinoma, hepatoid carcinoma, colloid carcinoma, undifferentiated carcinoma, and undifferentiated carcinomas with osteoclast-like giant cells.

30. The method according to any one of the preceding claims wherein the pancreatic cancer is pancreatic ductal adenocarcinoma.

31. The method according to any one of the preceding claims wherein the method is repeated.

32. The method according to claim 31 wherein the method is repeated using a test sample taken from the same individual at a different time period to the previous test sample(s) used.

33. The method according to claim 32 wherein the method is repeated using a test sample taken between 1 day to 104 weeks to the previous test sample(s) used, for example, between 1 week to 100 weeks, 1 week to 90 weeks, 1 week to 80 weeks, 1 week to 70 weeks, 1 week to 60 weeks, 1 week to 50 weeks, 1 week to 40 weeks, 1 week to 30 weeks, 1 week to 20 weeks, 1 week to 10 weeks, 1 week to 9 weeks, 1 week to 8 weeks, 1 week to 7 weeks, 1 week to 6 weeks, 1 week to 5 weeks, 1 week to 4 weeks, 1 week to 3 weeks, or 1 week to 2 weeks.

34. The method according to claim 32 or 33 wherein the method is repeated using a test sample taken every period from the group consisting of: 1 day, 2 days, 3 day, 4 days, 5 days, 6 days, 7 days, 10 days, 2 weeks, 3 weeks, 4 weeks, 5 weeks, 6 weeks, 7 weeks, 8 weeks, 9 weeks, 10 weeks, 15 weeks, 20 weeks, 25 weeks, 30 weeks, 35 weeks, 40 weeks, 45 weeks, 50 weeks, 55 weeks, 60 weeks, 65 weeks, 70 weeks, 75 weeks, 80 weeks, 85 weeks, 90 weeks, 95 weeks, 100 weeks, 104, weeks, 105 weeks, 110 weeks, 115 weeks, 120 weeks, 125 weeks and 130 weeks.

35. The method according to any one of claims 32 to 34 wherein the method is repeated at least once, for example, 2 times, 3 times, 4 times, 5 times, 6 times, 7 times, 8 times, 9 times, 10 times, 11 times, 12 times, 13 times, 14 times, 15 times, 16 times, 17 times, 18 times, 19 times, 20 times, 21 times, 22 times, 23, 24 times or 25 times.

36. The method according to any one of claims 32 to 35 wherein the method is repeated until pancreatic cancer is diagnosed in the individual using conventional clinical methods.

37. The method according to any one of the preceding claims wherein step (b) comprises measuring the expression of the protein or polypeptide of the one or more biomarker(s).

38. The method according to claim 37 wherein step (b), (d) and/or step (f) is performed using one or more first binding agent capable of binding to a biomarker protein or polypeptide listed in Table A.

39. The method according to claim 38 wherein the first binding agent comprises or consists of an antibody or an antigen-binding fragment thereof.

40. The method according to claim 39 wherein the antibody or antigen-binding fragment thereof is a recombinant antibody or antigen-binding fragment thereof.

41. The method according to claim 39 or 40 wherein the antibody or antigen-binding fragment thereof is selected from the group consisting of: scFv; Fab; a binding domain of an immunoglobulin molecule.

42. The method according to any one of claims 38 to 41 wherein the first binding agent is immobilised on a surface.

43. The method according to any one of claims 27 to 42 wherein the one or more biomarkers in the test and/or control sample(s) are labelled with a detectable moiety.

44. The method according to claim 43 wherein the detectable moiety is selected from the group consisting of: a fluorescent moiety; a luminescent moiety; a chemiluminescent moiety; a radioactive moiety; an enzymatic moiety.

45. The method according to claim 43 or 44 wherein the detectable moiety is biotin.

46. The method according to any one of claims 41 to 45 wherein step (b), (d) and/or step (f) is performed using an assay comprising a second binding agent capable of binding to the one or more biomarkers, the second binding agent comprising a detectable moiety.

47. The method according to claim 46 wherein the second binding agent comprises or consists of an antibody or an antigen-binding fragment thereof.

48. The method according to claim 47 wherein the antibody or antigen-binding fragment thereof is a recombinant antibody or antigen-binding fragment thereof.

49. The method according to claim 47 or 48 wherein the antibody or antigen-binding fragment thereof is selected from the group consisting of: scFv; Fab; a binding domain of an immunoglobulin molecule.

50. The method according to any one of claims 46 to 49 wherein the detectable moiety is selected from the group consisting of: a fluorescent moiety; a luminescent moiety; a chemiluminescent moiety; a radioactive moiety; an enzymatic moiety.

51. The method according to claim 50 wherein the detectable moiety is fluorescent moiety (for example an Alexa Fluor dye, e.g. Alexa647).

52. The method according to any one of the preceding claims wherein the method comprises or consists of an ELISA (Enzyme Linked Immunosorbent Assay).

53. The method according to any one of the preceding claims wherein step (b), (d) and/or step (f) is performed using an array.

54. The method according to claim 53 wherein the array is selected from the group consisting of: macroarray; microarray; nanoarray.

55. The method according to any one of claims 37 to 54 wherein the method comprises:
(i) labelling biomarkers present in the sample with biotin;
(ii) contacting the biotin-labelled proteins with an array comprising a plurality of scFv immobilised at discrete locations on its surface, the scFv having specificity for one or more of the proteins in Table A;
(iii) contacting the biotin-labelled proteins (immobilised on the scFv) with a streptavidin conjugate comprising a fluorescent dye; and
(iv) detecting the presence of the dye at discrete locations on the array surface wherein the expression of the dye on the array surface is indicative of the expression of a biomarker from Table A in the sample.

56. The method according to any one of claims 1 to 36 wherein step (b), (d) and/or (f) comprises measuring the expression of a nucleic acid molecule encoding the one or more biomarkers.

57. The method according to claim 56, wherein the nucleic acid molecule an mRNA molecule.

58. The method according to claim 56, wherein the nucleic acid molecule a DNA molecule.

59. The method according to claim 58, wherein the nucleic acid molecule a cDNA or ctDNA molecule.

60. The method according to any one of claims 56 to 59, wherein measuring the expression of the one or more biomarker(s) in step (b), (d) and/or (f) is performed using a method selected from the group consisting of Southern hybridisation, Northern hybridisation, polymerase chain reaction (PCR), reverse transcriptase PCR (RT-PCR), quantitative real-time PCR (qRT-PCR), nanoarray, microarray, macroarray, autoradiography and in situ hybridisation.

61. The method according to any one of claims 56 to 60, wherein measuring the expression of the one or more biomarker(s) in step (b) is determined using a DNA microarray.

62. The method according to any one of claims 56 to 61, wherein measuring the expression of the one or more biomarker(s) in step (b), (d) and/or (f) is performed using one or more binding moieties, each individually capable of binding selectively to a nucleic acid molecule encoding one of the biomarkers identified in Table A.

63. The method according to claim 62, wherein the one or more binding moieties each comprise or consist of a nucleic acid molecule.

64. The method according to claim 63 wherein, the one or more binding moieties each comprise or consist of DNA, RNA, PNA, LNA, GNA, TNA or PMO.

65. The method according to claim 63 or 64, wherein the one or more binding moieties each comprise or consist of DNA.

66. The method according to any one of claims 63 to 65 wherein the one or more binding moieties are 5 to 100 nucleotides in length, for example 15 to 35 nucleotides in length.

67. The method according to any one of claims 63 to 66 wherein the binding moiety comprises a detectable moiety.

68. The method according to claim 67 wherein the detectable moiety is selected from the group consisting of: a fluorescent moiety; a luminescent moiety; a chemiluminescent moiety; a radioactive moiety (for example, a radioactive atom); or an enzymatic moiety.

69. The method according to claim 68 wherein the detectable moiety comprises or consists of a radioactive atom.

70. The method according to claim 69 wherein the radioactive atom is selected from the group consisting of technetium-99m, iodine-123, iodine-125, iodine-131, indium-111, fluorine-19, carbon-13, nitrogen-15, oxygen-17, phosphorus-32, sulphur-35, deuterium, tritium, rhenium-186, rhenium-188 and yttrium-90.

71. The method according to claim 68 wherein the detectable moiety of the binding moiety is a fluorescent moiety.

72. The method according to any one of the preceding claims wherein the sample provided in step (a), (c) and/or (e) is selected from the group consisting of unfractionated blood, plasma, serum, tissue fluid, pancreatic tissue, milk, bile and urine.

73. The method according to claim 72, wherein the sample provided in step (a), (c) and/or (e) is selected from the group consisting of unfractionated blood, plasma and serum.

74. The method according to claim 72 or 73, wherein the sample provided in step (a), (c) and/or (e) is serum.

75. The method according to any one of the preceding claims wherein the predictive accuracy of the method, as determined by an ROC AUC value, is at least 0.50, for example at least 0.55, 0.60, 0.65, 0.70, 0.75, 0.80, 0.85, 0.90, 0.95, 0.96, 0.97, 0.98 or at least 0.99.

76. The method according to claim 75 wherein the predictive accuracy of the method, as determined by an ROC AUC value, is at least 0.70.

77. The method according to any one of the preceding claims further comprising one or more further clinical investigations (such as testing a biopsy sample and/or in vivo imaging of the patient) in order to confirm or establish the diagnosis.

78. The method according to any one of the preceding claims wherein, in the event that the individual is diagnosed with pancreatic cancer, the method comprises step (g) of providing the individual with a pancreatic cancer therapy.

79. The method according to claim 78 wherein the pancreatic cancer therapy is selected from the group consisting of surgery, chemotherapy, radiotherapy, immunotherapy, chemoimmunotherapy, thermochemotherapy and combinations thereof.

80. The method according to claim 78 or 79 wherein the pancreatic cancer therapy comprises or consists of surgical removal of the pancreas in whole or in part (flor example, using the Whipple procedure to remove the pancreas head or a total pancreatectomy) combined with chemotherapy (for example, gemcitabine and/or 5-fluorouracil).

81. An array for determining the presence of, or risk of having, pancreatic cancer in an individual comprising an agent or agents for detecting the presence in a protein and/or nucleic acid sample from the individual of one or more of the biomarkers defined in Table A.

82. The array according to claim 81 wherein the agent or agents for detecting the presence in a sample of one or more of the biomarkers defined in Table A is/are one or more binding agents as defined in any one of claims 39 to 42 or 63 to 71.

83. The array according to claim 81 or 82 wherein the array comprises agents capable of binding to all of the biomarkers defined in Table A.

84. The array according to claim 81 or 82 wherein the array comprises agents capable of binding to the following biomarkers;
DLG1, PRKCZ, VEGF, C3, C1INH, IL-4, IFNγ, C5, PTK6, CHP1, APLF, CAMK4, MAGI, MARK1, PRDM8, APOA1, CDK2, HADH2, C4, VSX2/CHX10, ICAM-1, IL-13, Lewis x/CD15, MYOM2, Factor P, Sialyl Lewis x, TNFβ and Complement C1q
(optionally including one or more biomarkers from Table B and/or IL-6 and/or GEM).

85. The array according to any one of claims 81 to 84 wherein the array comprises antibodies, or antigen-binding fragments thereof, capable of binding to all of the biomarkers at the protein level.

86. The array according to claim 85 wherein the array comprises one or more of the antibodies identified in Table 7.

87. The array according to claim 85 wherein the array comprises or consists of all of the antibodies in Table 8.

88. The array according to any one of claims 81 to 84 wherein the array comprises agents capable of binding to all of the biomarkers at the mRNA and/or DNA level.

89. The array according to any one of claims 81 to 88 further comprising a positive control sample (such as bovine serum albumin).

90. The array according to any one of claims 81 to 89 further comprising a negative control sample (such as phosphate-buffered saline).

91. Use of one or more biomarkers selected from the group defined in Table A as biomarkers for determining the presence of, or risk of having, pancreatic cancer in an individual.

92. The use according to claim 91 wherein the one or more biomarkers comprise(s) the following biomarkers:
DLG1, PRKCZ, VEGF, C3, C1INH, IL-4, IFNγ, C5, PTK6, CHP1, APLF, CAMK4, MAGI, MARK1, PRDM8, APOA1, CDK2, HADH2, C4, VSX2/CHX10, ICAM-1, IL-13, Lewis x/CD15, MYOM2, Factor P, Sialyl Lewis x, TNFβ and Complement C1q
(optionally including one or more biomarkers from Table B plus IL-6 and GEM).

93. The use according to claim 91 or 92 wherein all of the biomarkers defined in Table A are used together as a diagnostic signature for determining the presence of pancreatic cancer in an individual.

94. A kit for determining the presence of, or risk of having, pancreatic cancer comprising:
(a) an array according to any one of claims 81 to 90, or components for making the same; and
(b) instructions for performing the method as defined in any one of claims 1 to 80.

95. A method of treating pancreatic cancer in an individual comprising the steps of:
(a) diagnosing pancreatic cancer according to the method defined in any one of claims 1 to 80; and
(b) providing the individual with pancreatic cancer therapy.

96. The method according to claim 95 wherein step (a) further comprises comprise one or more further clinical investigations (such as testing a biopsy sample and/or in vivo imaging of the patient) in order to confirm or establish the diagnosis.

97. The method according to claim 95 or 96 wherein the pancreatic cancer therapy is selected from the group consisting of surgery (e.g., resection), chemotherapy, immunotherapy, chemoimmunotherapy and thermochemotherapy.

98. The method of any one of claims 95 to 97 wherein the pancreatic cancer therapy comprises surgical removal of the pancreas in whole or in part (e.g. using the Whipple procedure to remove the pancreas head or a total pancreatectomy) combined with chemotherapy (e.g. gemcitabine and/or 5-fluorouracil).

99. A method or use for determining the presence of pancreatic cancer in an individual substantially as described herein.

100. An array or kit for determining the presence of pancreatic cancer in an individual substantially as described herein.
